(19) United States
(12) Patent Application Publication
(10) Pub. No.: US 2010/0064393 A1
(43) Pub. Date: Mar. 11, 2010

(54) Bacillus liceniformis chromosome

(75) Inventors: Randy Berka, Davis, CA (US); Michael Rey, Davis, CA (US); Preethi Ramaiya, Fairfield, CA (US)

Correspondence Address: NOVOZYMES, INC., 1445 DREW AVE, DAVIS, CA, 95618, US

(73) Assignee: Novozymes, Inc., Davis, CA (US)

(21) Appl. No.: 12/516,426

(22) PCT Filed: Nov. 29, 2007
(86) PCT No.: PCT/US07/24746

§ 371 Date: Jun. 11, 2009

Related U.S. Application Data
(60) Provisional application No. 60/861,992, filed on Nov. 29, 2006.

(51) Int. Cl. A01H 5/00; C12P 21/06; C12N 15/82; C12N 5/10; C40B 30/04; C40B 40/06; C07K 14/415; C07H 21/04; C07H 21/02

(52) U.S. Cl. 800/298; 435/69.1; 435/468; 435/419; 506/9; 506/16; 530/370; 536/23.1; 536/23.2; 536/23.7; 536/24.5

(57) ABSTRACT

The present invention relates to an isolated polynucleotide of the complete chromosome of Bacillus licheniformis SJ1904 (ATCC PTA-7992). The present invention also relates to isolated polynucleotides of the chromosome of Bacillus licheniformis SJ1904 that encode biologically active substances and to nucleic acid constructs, vectors, and host cells comprising the polynucleotides as well as methods for producing biologically active substances encoded by the polynucleotides and to methods of using the isolated polynucleotides of the complete chromosome of Bacillus licheniformis SJ1904.

### REFERENCE TO A SEQUENCE LISTING

[0001] Incorporated herein by reference are 2 copies of the Sequence Listing on compact disk. Copy 1 is done on a Intel x86 machine format, in Windows XP operating system compatibility, there is one file saved as 01 10930.204-WO SeqList.txt, and is 20,210 KB, and was created on Nov. 28, 2007. Copy 2 is identical to Copy 1. The content of the attached compact disks are the same and includes no new matter.

### REFERENCE TO A DEPOSIT OF BIOLOGICAL MATERIAL

[0002] This application contains a reference to a deposit of biological material, which deposit is incorporated herein by reference.

### BACKGROUND OF THE INVENTION

[0003] 1. Field of the Invention

[0004] The present invention relates to an isolated polynucleotide molecule comprising the complete chromosome of Bacillus licheniformis SJ1904. The present invention also relates to features (polynucleotides) of the complete chromosomal DNA molecule of Bacillus licheniformis SJ1904 that encode biologically active substances and to nucleic acid constructs, vectors, and host cells comprising the features. The present invention also relates to methods for producing biologically active substances encoded by the features and to methods of using the isolated features derived from the complete chromosomal DNA molecule of Bacillus licheniformis SJ1904.

[0005] 2. Description of the Related Art

[0006] Microbes have evolved for some 3.8 billion years and make up most of the earth's biomass. They are found in virtually every environment, surviving and thriving in extremes of heat, cold, radiation, pressure, salt, acidity, and darkness. Often in these environments, no other forms of life are found and the only nutrients come from inorganic matter. The diversity and range of their environmental adaptations indicate that microbes long ago “solved” many problems for which scientists are still actively seeking solutions. The value in determining the complete genome sequence of microbes is that it provides a detailed blueprint for the organism revealing biochemical pathways, substrates, intermediates, and end products as well as regulatory networks, and evolutionary relationships to other microbes. A complete manifest of proteins, both structural and catalytic, is encoded as a list of features in the DNA molecule comprising the genome, as well as their likely cellular location.

[0007] Knowledge about the enormous range of microbial capacities has broad and far-reaching implications for environmental, energy, health, and industrial applications, such as cleanup of toxic-waste, production of novel therapeutic and preventive agents (drugs and vaccines), energy generation and development of renewable energy sources, production of chemical catalysts, reagents, and enzymes to improve efficiency of industrial processes, management of environmental carbon, nitrogen and nutrient cycling, detection of disease-causing organisms, monitoring of the safety of food and water supplies, use of genetically altered bacteria as living sensors (biosensors) to detect harmful chemicals in soil, air, or water, and understanding of specialized systems used by microbial cells to live in natural environments. Bacillus licheniformis is a gram positive spore-forming bacterium that is widely distributed as a saprophytic organism in the environment. Unlike most other bacilli that are predominantly aerobic, Bacillus licheniformis is a facultative anaerobe that may allow it to grow in additional ecological niches. This species produces a diverse assortment of extracellular enzymes that are believed to contribute to the process of nutrient cycling in nature (Claus, D. and Berkeley, R. C. W., 1986, In Bergey's Manual of Systematic Bacteriology, Vol. 2., eds. Sneath, P. H. A. et al., Williams and Wilkins Co., Baltimore, Md., pp. 1105-1139). Certain Bacillus licheniformis isolates are capable of denitrification but, the relevance of this characteristic to environmental denitrification may be small since the species generally persists in soil as endospores (Alexander, M., 1977, Introduction to Soil Microbiology. John Wiley and Sons, Inc., New York).

[0008] There are numerous industrial and agricultural uses for Bacillus licheniformis and its extracellular products. The species has been used for decades in the manufacture of industrial enzymes including several proteases, alpha-amylase, penicillinase, pentosanase, cycloglucosyltransferase, beta-mannanase, and several pectinolytic enzymes, owing largely to its ability to secrete sizeable amounts of degradative enzymes. Bacillus licheniformis is also used to produce peptide antibiotics such as bacitracin and proticin, in addition to a number of specialty chemicals such as citric acid, inosine, inosinic acid, and poly-gamma-glutamic acid. The proteases from Bacillus licheniformis are used in the detergent industry as well as for dehairing and batting of leather (Eveleigh, D. E., 1981, Scientific American 245, 155-178). Amylases from Bacillus licheniformis are deployed for the hydrolysis of starch, desizing of textiles, and sizing of paper (Erickson, R. J., 1976, In Microbiology, ed. Schlesinger, D. (Am. Soc. Microbiol., Washington, D.C.), pp. 406-419.). Certain strains of Bacillus licheniformis have shown efficacy to destroy fungal pathogens affecting maize, grasses, and vegetable crops (U.S. Pat. No. 5,589,381; U.S. Pat. No. 5,665,354). As an endospore-forming bacterium, the ability of the organism to survive under unfavorable environmental conditions may enhance its potential as a natural control agent.

[0009] Bacillus licheniformis can be differentiated from other bacilli on the basis of metabolic and physiological tests (Logan, N. A. and Berkeley, R. C. W., 1981, In The Aerobic Endospore-Forming Bacteria: Classification and Identification, eds. Berkeley, R. C. W. and Goodfellow, M., Academic Press, Inc., London, pp. 106-140; O'Donnell, A. G., Norris, J. R., Berkeley, R. C. W., Claus, D., Kanero, T., Logan, N. A., and Nozaki, R., 1980, Internat. J. Systematic Bacteriol. 30: 448-459). However, biochemical and phenotypic characteristics may be ambiguous among closely related species. Lapidus et al. (Lapidus, A., Galleron, N., Andersen, J. T., Jørgensen, P. L. Ehrlich, S. D., and Sorokin, A., 2002, FEMS Microbiol. Lett. 209: 23-30) constructed a physical map of the Bacillus licheniformis strain ATCC 14580 chromosome using a PCR approach, and established a number of regions of co-linearity where gene content and organization were conserved with the Bacillus subtilis chromosome. In addition, Rey et al. (Rey, M. W, Ramaiya, P, Nelson, B. A., Brody-Karpin, S. D., Zaretsky, E. J., Tang, M., Lopez de Leon, A., Xiang, H., Gusti, V., Clausen, I. G., Olsen, P. B., Rasmussen, M. D., Andersen, J. T., Jørgensen, P. L., Larsen, T. S., Sorokin, A., Bolotin, A., Lapidus, A., Galleron, N., Ehrlich, S. D., and Berka, R. M. 2004. Complete genome sequence of the industrial bacterium Bacillus licheniformis and comparisons with closely related Bacillus species. Genome Biol. 5: R77) published the complete genome sequence of the Bacillus licheniformis type strain ATCC 14580. They determined that the genome of Bacillus licheniformis ATCC 14580 comprises a circular chromosome of 4,222,336 base-pairs (bp) containing 4,208 predicted protein-coding genes with an average size of 873 bp, seven rRNA operons, and 72 tRNA genes. The Bacillus licheniformis ATCC 14580 chromosome contains large regions that are colinear with the genomes of Bacillus subtilis strain 168 and Bacillus halodurans strain C-125, and approximately 80% of the predicted Bacillus licheniformis ATCC 14580 coding sequences have Bacillus subtilis orthologs. However, despite the unmistakable organizational similarities between these Bacillus licheniformis and Bacillus subtilis genomes, there are notable differences in the numbers and locations of prophages, transposable elements and a number of extracellular enzymes and secondary metabolic pathway operons that distinguish these species. These differences include a region of more than 80 kilobases (kb) that comprises a cluster of polyketide synthase genes and a second operon of 38 kb encoding plipastatin synthase enzymes that are absent in the Bacillus licheniformis ATCC 14580 genome.

[0010] Public databases now contain a multitude of complete bacterial genomes, including several genomes from different strains of the same species. Recent analyses have shown, using pairwise whole genome alignments, that different strains of the same species may differ substantially in gene content. For example, genome comparisons of Escherichia coli strains CFT073, EDL933 and MG1655 revealed that only 39.2% of their combined set of proteins (gene products) are common to all three strains highlighting the astonishing diversity among strains of the same species (Welch et al., 2002, Proc. Nat. Acad. Sci. USA 99: 17020-17024; Perna et al., 2001, Nature 409: 529-533; Hayashi et al., 2001, DNA Res. 8: 11-22; Blattner et al., 1997, Science 277: 1453-1474). Furthermore, the genome sequence of E. coli strain CFT073 revealed 1,623 strain-specific genes (21.2%). From comparisons of this type, it is clearly seen that bacterial genomes are segmented into a common conserved backbone and strain-specific sequences. Typically the genome of a given strain within a species shows a mosaic structure in terms of the distribution of conserved “backbone” genes conserved among all strains and non-conserved genes that may have been acquired by horizontal transfer (Welch et al., 2002, Proc. Nat. Acad. Sci. USA 99: 17020-17024; Brzuszkiewicz et al., 2006, Proc. Nat. Acad. Sci. USA 103: 12879-12884).

[0011] Therefore, it would be advantageous to the art to have available the complete primary structure of the chromosomal DNA molecule of the Bacillus licheniformis strain SJ1904, an industrial strain that differs from the type strain ATCC 14580. With the complete chromosome data in hand, it should be possible to do comparative genomics and proteomics studies that can lead to improved industrial strains as well as to a better understanding of genome evolution among closely-related bacilli in the subtilis-licheniformis group.

[0012] The present invention relates to an isolated polynucleotide of the complete chromosome of Bacillus licheniformis strain SJ1904.

### SUMMARY OF THE INVENTION

[0013] The present invention relates to an isolated polynucleotide of the complete chromosomal DNA molecule of Bacillus licheniformis SJ1904 (ATCC PTA-7992) having the nucleotide sequence of SEQ ID NO: 1.

[0014] The present invention also relates to isolated features (polynucleotides) of the complete chromosomal DNA molecule of Bacillus licheniformis SJ1904 encoding biologically active substances selected from the group consisting of SEQ ID NOs: 2-4876 and subsequences thereof encoding fragments having biological activity.

[0015] The present invention also relates to isolated features (polynucleotides) encoding biologically active substances, selected from the group consisting of:

[0016] (a) a polynucleotide comprising a nucleotide sequence having preferably at least 60% identity, more preferably at least 65% identity, more preferably at least 70% identity, more preferably at least 75% identity, more preferably at least 80% identity, more preferably at least 85% identity, more preferably at least 90% identity, even more preferably at least 90% identity, most preferably at least 95% identity, and even most preferably at least 97% identity with a polynucleotide selected from the group consisting of SEQ ID NOs: 2-4876 and subsequences thereof encoding fragments having biological activity;

[0017] (b) a polynucleotide comprising a nucleotide sequence that hybridizes under preferably at least medium stringency conditions, more preferably at least medium-high stringency conditions, or most preferably at least high stringency conditions with a polynucleotide selected from the group consisting of SEQ ID NOs: 2-4876 and full-length complementary strands thereof;

[0018] (c) a polynucleotide encoding a biologically active substance comprising an amino acid sequence having preferably at least 60% identity, more preferably at least 65% identity, more preferably at least 70% identity, more preferably at least 75% identity, more preferably at least 80% identity, more preferably at least 85% identity, even more preferably at least 90% identity, most preferably at least 95% identity, and even most preferably at least 97% identity with an amino acid sequence selected from the group consisting of SEQ ID NOs: 4877-9751 and fragments thereof retaining biological activity; and

[0019] (d) a polynucleotide encoding an artificial variant comprising a substitution, deletion, and/or insertion of one or more (several) amino acids of an amino acid sequence selected from the group consisting of SEQ ID NOs: 4877-9751 and fragments thereof retaining biological activity.

[0020] The present invention also relates to nucleic acid constructs, vectors, and host cells comprising the isolated polynucleotides.

[0021] The present invention also relates to isolated biologically active substances comprising an amino acid sequence selected from the group consisting of SEQ ID NOs: 4877-9751 and fragments thereof retaining biological activity.

[0022] The present invention also relates to isolated biologically active substances, selected from the group consisting of:

[0023] (a) a biologically active substance comprising an amino acid sequence having preferably at least 60% identity, more preferably at least 65% identity, more preferably at least 70% identity, more preferably at least 75% identity, more preferably at least 80% identity, more preferably at least 85% identity, even more preferably at least 90% identity, most preferably at least 95% identity, and even most preferably at least 97% identity with an amino acid sequence selected from the group consisting of SEQ ID NOs: 4877-9751 and fragments thereof retaining biological activity;

[0024] (b) a biologically active substance encoded by a polynucleotide comprising a nucleotide sequence having preferably at least 60% identity, more preferably at least 65% identity, more preferably at least 70% identity, more preferably at least 75% identity, more preferably at least 80% identity, more preferably at least 85% identity, even more preferably at least 90% identity, most preferably at least 95% identity, and even most preferably at least 97% identity with a polynucleotide selected from the group consisting of SEQ ID NOs: 2-4876 and subsequences thereof encoding fragments having biological activity;

[0025] (c) a biologically active substance encoded by a polynucleotide comprising a nucleotide sequence that hybridizes under preferably at least medium stringency conditions, more preferably at least medium-high stringency conditions, or most preferably at least high stringency conditions with a polynucleotide selected from the group consisting of SEQ ID NOs: 2-4876 and full-length complementary strands thereof; and

[0026] (d) an artificial variant comprising a substitution, deletion, and/or insertion of one or more (several) amino acids of an amino acid sequence selected from the group consisting of SEQ ID NOs: 4877-9751 and fragments thereof retaining biological activity.

[0027] The present invention also relates to methods for producing such substances having biological activity comprising (a) cultivating a recombinant host cell comprising a nucleic acid construct comprising a polynucleotide encoding the biologically active substance under conditions suitable for production of the biologically active substance; and (b) recovering the biologically active substance.

[0028] The present invention also relates to methods for monitoring differential expression of a plurality of genes in a first bacterial cell relative to expression of the same genes in one or more (several) second bacterial cells, comprising:

[0029] (a) adding a mixture of detection reporter-labeled nucleic acids isolated from the bacterial cells to a substrate containing an array of Bacillus licheniformis polynucleotides selected from the group consisting of SEQ ID NOs: 2-4876, full-length complementary strands of SEQ ID NOs: 2-4876, and fragments of SEQ ID NOs: 2-4876, under conditions where the detection reporter-labeled nucleic acids hybridize to complementary sequences of the Bacillus licheniformis polynucleotides on the array, wherein the nucleic acids from the first bacterial cell and the one or more (several) second bacterial cells are labeled with a first detection reporter and one or more (several) different second detection reporters, respectively; and

[0030] (b) examining the array under conditions wherein the relative expression of the genes in the bacterial cells is determined by the observed detection signal of each spot on the array in which (i) the Bacillus licheniformis polynucleotides on the array that hybridize to the nucleic acids obtained from either the first or the one or more (several) second bacterial cells produce a distinct first detection signal or one or more (several) second detection signals, respectively, and (ii) the Bacillus licheniformis polynucleotides on the array that hybridize to the nucleic acids obtained from both the first and one or more (several) second bacterial produce a distinct combined detection signal.

[0031] The present invention also relates to methods for isolating a polynucleotide encoding an enzyme, comprising:

[0032] (a) adding a mixture of labeled first nucleic acid probes, isolated from a microbial strain cultured on medium without an inducing substrate, and labeled second nucleic acid probes, isolated from the microbial strain cultured on medium with the inducing substrate, to an array of Bacillus licheniformis polynucleotides selected from the group consisting of the polynucleotides of SEQ ID NOs: 2-4876, full-length complementary strands of SEQ ID NOs: 2-4876, and fragments of SEQ ID NOs: 2-4876, under conditions where the labeled nucleic acid probes hybridize to complementary sequences of the Bacillus licheniformis polynucleotides on the array, wherein the first nucleic acid probes are labeled with a first reporter and the second nucleic acid probes are labeled with a second reporter;

[0033] (b) examining the array under conditions wherein the relative expression of the genes of the microbial strain is determined by the observed hybridization reporter signal of each spot on the array in which (i) the Bacillus licheniformis polynucleotides on the array that hybridize to the first nucleic acid probes produce a distinct first hybridization reporter signal or the second nucleic acid probes produce a distinct second hybridization reporter signal, and (ii) the Bacillus licheniformis polynucleotides on the array that hybridize to both the first and second nucleic acid probes produce a distinct combined hybridization reporter signal; and

[0034] (c) isolating a polynucleotide from the microbial strain that encodes an enzyme that degrades or converts the substrate.

[0035] The present invention also relates to genes or polynucleotides isolated by such methods and nucleic acid constructs, vectors, and host cells containing the isolated genes or polynucleotides.

### DEFINITIONS

[0036] Biologically active substance: The term “substance having biological activity” or “biologically active substance” is defined herein as any substance having biological activity encoded by a single gene or polynucleotide. Such substances include, but are not limited to, polypeptides (e.g., enzymes) and RNA (e.g., mRNA, tRNA, rRNA, and ncRNA). For purposes of the present invention, biological activity is determined according to procedures known in the art such as those described by Carpenter and Sabatini, 2004, Nature 5: 11-22; Sordie et al., 2003, Proceedings of the National Academy of Sciences USA 100: 11964-11969; Braun and LaBaer, 2003, TRENDS in Biotechnology 21: 383-388; and Kaberdin and McDowall, 2003, Genome Research 13: 1961-1965.

[0037] In a preferred aspect, the biologically active substance is a polypeptide. The polypeptide may be any polypeptide having a biological activity of interest. The term “polypeptide” is not meant herein to refer to a specific length of the encoded product and, therefore, encompasses peptides, oligopeptides, and proteins.

[0038] In a more preferred aspect, the polypeptide is an antibody, antigen, antimicrobial peptide, enzyme, growth factor, hormone, immunodilator, neurotransmitter, receptor, reporter protein, structural protein, transcription factor, and transporter.

[0039] In an even more preferred aspect, the polypeptide is an oxidoreductase, transferase, hydrolase, lyase, isomerase, or ligase.

[0040] In a most preferred aspect, the polypeptide is an aminopeptidase, amylase, carbohydrase, carboxypeptidase, catalase, cellulase, chitinase, cutinase, cyclodextrin glycosyltransferase, deoxyribonuclease, esterase, alpha-galactosidase, beta-galactosidase, glucoamylase, glucocerebrosidase, alpha-glucosidase, beta-glucosidase, haloperoxidase, invertase, laccase, lipase, mannosidase, mutanase, oxidase, pectinolytic enzyme, peptidoglutaminase, peroxidase, phospholipase, phytase, polyphenoloxidase, proteolytic enzyme, ribonuclease, transglutaminase, urokinase, or xylanase

[0041] In another more preferred aspect, the polypeptide is an albumin, collagen, tropoelastin, elastin, or gelatin.

[0042] Isolated biologically active substance: The term “isolated biologically active substance” is defined herein as a substance that is at least 1% pure, preferably at least 5% pure, more preferably at least 10% pure, more preferably at least 20% pure, more preferably at least 40% pure, more preferably at least 60% pure, even more preferably at least 80% pure, and most preferably at least 90% pure, as determined by SDS-PAGE, HPLC, capillary electrophoresis, or any other method used in the art.

[0043] Substantially pure biologically active substance or pure biologically active substance: The term “substantially pure biologically active substance” is defined herein as a biologically active substance preparation that contains at most 10%, preferably at most 8%, more preferably at most 6%, more preferably at most 5%, more preferably at most 4%, more preferably at most 3%, even more preferably at most 2%, most preferably at most 1%, and even most preferably at most 0.5% by weight of other material with which it is natively associated. It is, therefore, preferred that the substantially pure biologically active substance is at least 92% pure, preferably at least 94% pure, more preferably at least 95% pure, more preferably at least 96% pure, more preferably at least 96% pure, more preferably at least 97% pure, even more preferably at least 98% pure, most preferably at least 99%, and even most preferably at least 99.5% pure by weight of the total material present in the preparation. The term “pure biologically active substance” is defined as a biologically active substance preparation that contains no other material with which it is natively associated. The biologically active substances of the present invention are preferably in a substantially pure form. In particular, it is preferred that the biologically active substances are in “essentially pure form”, i.e., that the biologically active substance preparation is essentially free of other material with which it is natively or recombinantly associated. This can be accomplished, for example, by preparing the biologically active substance by means of well-known recombinant methods or by classical purification methods.

[0044] Identity: The relatedness between two amino acid sequences or between two nucleotide sequences is described by the parameter “identity”.

[0045] For purposes of the present invention, the degree of sequence identity between two amino acid sequences is determined by the Smith-Waterman Protein method for the GENEMATCHER2™ as implemented by Paracel Inc. (Pasadena, Calif.), or the BLASTP method as described by Altschul et al., 1990, Journal of Molecular Biology 215: 403-410.

[0046] For purposes of the present invention, the degree of sequence identity between two nucleotide sequences is determined by the Smith Waterman nucleotide method for the GENEMATCHER2™ or BLASTN for the BlastMachine as implemented by Paracel Inc.

[0047] Polypeptide Fragment The term “polypeptide fragment” is defined herein as a polypeptide, which retains biological activity, having one or more (several) amino acids deleted from the amino and/or carboxyl terminus of a polypeptide encoded by any of the polynucleotides of the present invention, i.e., polypeptides of SEQ ID NOs: 4877-9751. Preferably, a fragment contains at least 80%, preferably at least 85%, more preferably at least 90%, even more preferably at least 95%, and most preferably at least 97% of the amino acid residues of the mature polypeptide product.

[0048] Subsequence: The term “subsequence” is defined herein as a polynucleotide comprising a nucleotide sequence of any of SEQ ID NOs: 2-4876 except that one or more (several) nucleotides have been deleted from the 5′ and/or 3′ end. Preferably, a subsequence contains at least 80%, preferably at least 85%, more preferably at least 90%, even more preferably at least 95%, and most preferably at least 97% of the nucleotides of any of the isolated polynucleotides of the present invention.

[0049] Substantially pure polynucleotide or pure polynucleotide: The term “substantially pure polynucleotide” as used herein refers to a polynucleotide preparation free of other extraneous or unwanted nucleotides and in a form suitable for use within genetically engineered protein production systems. Thus, a substantially pure polynucleotide contains at most 10%, preferably at most 8%, more preferably at most 6%, more preferably at most 5%, more preferably at most 4%, more preferably at most 3%, even more preferably at most 2%, most preferably at most 1%, and even most preferably at most 0.5% by weight of other polynucleotide material with which it is natively or recombinantly associated. A substantially pure polynucleotide may, however, include naturally occurring 5′ and 3′ untranslated regions, such as promoters and terminators. It is preferred that the substantially pure polynucleotide is at least 90% pure, preferably at least 92% pure, more preferably at least 94% pure, more preferably at least 95% pure, more preferably at least 96% pure, more preferably at least 97% pure, even more preferably at least 98% pure, most preferably at least 99%, and even most preferably at least 99.5% pure by weight. The polynucleotides of the present invention are preferably in a substantially pure form, i.e., that the polynucleotide preparation is essentially free of other polynucleotide material with which it is natively or recombinantly associated. The polynucleotides may be of genomic, cDNA, RNA, semisynthetic, synthetic origin, or any combinations thereof. The term “pure polynucleotide” is defined as a polynucleotide preparation that contains no other material with which it is natively associated.

[0050] Nucleic acid construct: The term “nucleic acid construct” as used herein refers to a nucleic acid molecule, either single- or double-stranded, which is isolated from a naturally occurring gene or which is modified to contain segments of nucleic acids in a manner that would not otherwise exist in nature or which is synthetic. The term nucleic acid construct is synonymous with the term “expression cassette” when the nucleic acid construct contains the control sequences required for expression of a coding sequence of the present invention.

[0051] Control sequence: The term “control sequences” is defined herein to include all components, which are necessary or advantageous for the expression of a biologically active substance of the present invention. Each control sequence may be native or foreign to the polynucleotide encoding the substance. Such control sequences include, but are not limited to, a leader, propeptide sequence, promoter, signal peptide sequence, and transcription terminator. At a minimum, the control sequences include a promoter, and transcriptional and translational stop signals. The control sequences may be provided with linkers for the purpose of introducing specific restriction sites facilitating ligation of the control sequences with the coding region of the polynucleotide encoding a biologically active substance.

[0052] Operably linked: The term “operably linked” as used herein refers to a configuration in which a control sequence is placed at an appropriate position relative to the coding sequence of the DNA sequence, such that the control sequence directs the expression of a biologically active substance.

[0053] Coding sequence: When used herein the term “coding sequence” is intended to cover a nucleotide sequence, which directly specifies the amino acid sequence of its protein product. The boundaries of the coding sequence are generally determined by an open reading frame, which usually begins with the ATG start codon or alternative start codons such as GTG and TTG.

[0054] Expression: The term “expression” includes any step involved in the production of a biologically active substance including, but not limited to, transcription, post-transcriptional modification, translation, post-translational modification, and secretion.

[0055] Expression vector: The term “expression vector” herein covers a DNA molecule, linear or circular, that comprises a segment encoding a biologically active substance of the invention, and is operably linked to additional segments that provide for its transcription.

[0056] Host cell: The term “host cell”, as used herein, includes any cell type that is susceptible to transformation, transfection, conjugation, electroporation, etc. with a nucleic acid construct, plasmid, or vector.

[0057] Modification: The term “modification” means herein any chemical modification of a biological substance, e.g., polypeptide, as well as genetic manipulation of the DNA encoding that biological substance. The modification can be a substitution, a deletion and/or an insertion of one or more (several) amino acids as well as replacements of one or more (several) amino acid side chains.

[0058] Artificial variant: When used herein, the term “artificial variant” means a polypeptide having biological activity produced by an organism expressing a modified nucleotide sequence, or the mature polypeptide coding region thereof. The modified nucleotide sequence is obtained through human intervention by modification of the nucleotide sequence disclosed or a homologous sequence thereof, or the mature polypeptide coding region thereof.

### DETAILED DESCRIPTION OF THE INVENTION

### Bacillus licheniformis SJ1904 Chromosome and Features (Polynucleotides) Thereof

[0059] The present invention relates to an isolated polynucleotide of the complete chromosomal DNA molecule of Bacillus licheniformis SJ1904 (ATCC PTA-7992) having the polynucleotide sequence of SEQ ID NO: 1. Bacillus licheniformis SJ1904 consists of a circular molecule of 4,345,159 base pairs with a mean % G+C content of 46.7%. The chromosome contains 4875 predicted protein-coding genes (SEQ ID NOs: 2-4876) with an average size of 789 bp, 7 rRNA operons, and 72 tRNA genes. The deduced amino acid sequences of the 4876 predicted protein-coding genes are shown in SEQ ID NOs: 4877-9851. SEQ ID NO: 4877 corresponds to SEQ ID NO: 2, SEQ ID NO: 4878 corresponds to SEQ ID NO: 3, SEQ ID NO: 4879 corresponds to SEQ ID NO: 4, etc. The predicted functions of the 4875 gene products are shown in Table 1.

[0060] The present invention also relates to isolated features (polynucleotides) of the complete chromosomal DNA molecule of Bacillus licheniformis SJ1904 encoding biologically active substances, selected from the group consisting of SEQ ID NOs: 2-4876 and subsequences thereof encoding fragments having biological activity.

[0061] The present invention also relates to isolated features (polynucleotides) encoding biologically active substances, selected from the group consisting of:

[0062] (a) a polynucleotide comprising a nucleotide sequence having preferably at least 60% identity, more preferably at least 65% identity, more preferably at least 70% identity, more preferably at least 75% identity, more preferably at least 80% identity, more preferably at least 85% identity, even more preferably at least 90% identity, most preferably at least 95% identity, and even most preferably at least 97% identity with a polynucleotide selected from the group consisting of SEQ ID NOs: 2-4876 and subsequences thereof encoding fragments having biological activity;

[0063] (b) a polynucleotide comprising a nucleotide sequence that hybridizes under preferably at least medium stringency conditions, more preferably at least medium-high stringency conditions, or most preferably at least high stringency conditions with a polynucleotide selected from the group consisting of SEQ ID NOs: 2-4876 and full-length complementary strands thereof;

[0064] (c) a polynucleotide encoding a biologically active substance comprising an amino acid sequence having preferably at least 60% identity, more preferably at least 65% identity, more preferably at least 70% identity, more preferably at least 75% identity, more preferably at least 80% identity, more preferably at least 85% identity, even more preferably at least 90% identity, most preferably at least 95% identity, and even most preferably at least 97% identity with an amino acid sequence selected from the group consisting of SEQ ID NOs: 4877-9751 and fragments thereof retaining biological activity; and

[0065] (d) a polynucleotide encoding an artificial variant comprising a substitution, deletion, and/or insertion of one or more (several) amino acids of an amino acid sequence selected from the group consisting of SEQ ID NOs: 4877-9751 and fragments thereof retaining biological activity.

[0066] In a first aspect, the present invention relates to an isolated polynucleotide having a degree of sequence identity to a polynucleotide selected from the group consisting of SEQ ID NOs: 2-4876 of at least 60%, preferably at least 65%, more preferably at least 70%, more preferably at least 75%, more preferably at least 80%, more preferably at least 85%, even more preferably at least 90%, most preferably at least 95%, and even most preferably at least 96%, 97%, 98%, or 99%, which encode biologically active substances having a particular biological activity (hereinafter “homologous biologically active substances”).

[0067] In a preferred aspect, the present invention relates to an isolated polynucleotide comprising a nucleotide sequence having preferably at least 60% identity, more preferably at least 65% identity, more preferably at least 70% identity, more preferably at least 75% identity, more preferably at least 80% identity, more preferably at least 85% identity, even more preferably at least 90% identity, most preferably at least 95% identity, and even most preferably at least 97% identity with a polynucleotide selected from the group consisting of SEQ ID NOs: 50, 55, 77, 82, 91, 98, 103, 110, 125, 169, 171, 172, 174, 176, 177, 178, 179, 180, 181, 182, 183, 185, 186, 187, 189, 192, 194, 195, 196, 198, 199, 201, 203, 204, 205, 206, 207, 208, 209, 210, 211, 212, 213, 214, 215, 216, 217, 218, 219, 220, 221, 222, 223, 225, 226, 227, 228, 229, 230, 240, 241, 242, 243, 244, 245, 246, 247, 248, 249, 250, 251, 252, 253, 254, 255, 256, 257, 258, 259, 260, 261, 262, 263, 264, 265, 266, 287, 306, 308, 322, 323, 329, 350, 354, 360, 363, 367, 381, 445, 469, 487, 488, 516, 523, 524, 537, 541, 575, 592, 607, 621, 627, 628, 666, 672, 688, 691, 702, 710, 719, 726, 729, 748, 751, 773, 774, 777, 791, 831, 833, 842, 847, 848, 849, 850, 851, 855, 857, 885, 886, 887, 901, 944, 982, 991, 994, 1018, 1032, 1034, 1058, 1078, 1088, 1098, 1108, 1112, 1128, 1148, 1153, 1154, 1158, 1160, 1164, 1175, 1176, 1177, 1180, 1181, 1183, 1184, 1193, 1194, 1199, 1222, 1237, 1244, 1262, 1263, 1265, 1266, 1278, 1302, 1313, 1314, 1315, 1316, 1317, 1318, 1345, 1355, 1373, 1374, 1401, 1424, 1432, 1433, 1440, 1442, 1448, 1455, 1470, 1496, 1497, 1501, 1509, 1527, 1539, 1556, 1565, 1589, 1619, 1629, 1630, 1634, 1635, 1636, 1638, 1639, 1640, 1641, 1642, 1643, 1644, 1645, 1646, 1647, 1649, 1650, 1651, 1652, 1653, 1654, 1655, 1657, 1658, 1659, 1660, 1661, 1662, 1663, 1664, 1665, 1666, 1667, 1668, 1669, 1670, 1671, 1672, 1673, 1675, 1676, 1677, 1679, 1684, 1688, 1692, 1694, 1703, 1704, 1728, 1732, 1734, 1736, 1775, 1783, 1816, 1831, 1838, 1851, 1853, 1866, 1887, 2002, 2007, 2022, 2038, 2044, 2067, 2070, 2072, 2076, 2094, 2106, 2119, 2120, 2121, 2124, 2131, 2139, 2147, 2148, 2166, 2171, 2194, 2196, 2198, 2205, 2211, 2213, 2216, 2221, 2230, 2236, 2240, 2241, 2255, 2258, 2263, 2273, 2277, 2286, 2288, 2289, 2290, 2291, 2292, 2293, 2294, 2295, 2296, 2297, 2298, 2299, 2300, 2301, 2302, 2303, 2304, 2305, 2324, 2327, 2337, 2341, 2347, 2351, 2364, 2381, 2388, 2400, 2403, 2408, 2410, 2411, 2414, 2415, 2424, 2425, 2430, 2435, 2439, 2457, 2467, 2468, 2469, 2483, 2491, 2498, 2504, 2505, 2506, 2507, 2508, 2509, 2510, 2511, 2512, 2514, 2515, 2516, 2517, 2518, 2519, 2520, 2521, 2522, 2524, 2525, 2526, 2527, 2528, 2529, 2530, 2531, 2532, 2533, 2534, 2535, 2536, 2537, 2538, 2539, 2540, 2541, 2542, 2543, 2544, 2545, 2546, 2547, 2548, 2549, 2550, 2551, 2552, 2553, 2554, 2555, 2556, 2557, 2558, 2559, 2560, 2561, 2562, 2564, 2565, 2566, 2567, 2568, 2569, 2570, 2571, 2572, 2573, 2574, 2575, 2576, 2577, 2578, 2579, 2580, 2581, 2582, 2583, 2584, 2585, 2586, 2587, 2588, 2590, 2591, 2592, 2593, 2594, 2595, 2596, 2597, 2598, 2599, 2600, 2601, 2602, 2603, 2604, 2605, 2606, 2607, 2608, 2609, 2610, 2611, 2612, 2613, 2614, 2615, 2616, 2617, 2618, 2619, 2620, 2621, 2622, 2623, 2624, 2625, 2626, 2627, 2628, 2629, 2630, 2631, 2632, 2633, 2634, 2635, 2636, 2637, 2638, 2639, 2640, 2641, 2642, 2643, 2644, 2645, 2646, 2647, 2648, 2649, 2650, 2651, 2652, 2653, 2654, 2655, 2656, 2657, 2658, 2659, 2661, 2664, 2665, 2666, 2667, 2669, 2670, 2671, 2672, 2673, 2674, 2675, 2676, 2677, 2679, 2680, 2681, 2684, 2685, 2686, 2688, 2689, 2690, 2691, 2692, 2693, 2696, 2697, 2698, 2706, 2723, 2730, 2733, 2751, 2762, 2795, 2806, 2813, 2834, 2835, 2841, 2850, 2866, 2867, 2874, 2878, 2898, 2902, 2904, 2917, 2947, 2957, 2960, 2969, 2972, 2973, 2999, 3004, 3019, 3028, 3054, 3064, 3082, 3093, 3123, 3133, 3134, 3135, 3136, 3137, 3138, 3139, 3140, 3141, 3142, 3143, 3144, 3145, 3146, 3147, 3148, 3149, 3150, 3162, 3222, 3224, 3225, 3226, 3227, 3228, 3229, 3231, 3244, 3248, 3259, 3264, 3265, 3287, 3291, 3303, 3310, 3311, 3321, 3324, 3355, 3362, 3371, 3429, 3434, 3442, 3446, 3458, 3471, 3486, 3496, 3499, 3503, 3504, 3508, 3549, 3558, 3577, 3593, 3598, 3601, 3603, 3606, 3611, 3642, 3653, 3655, 3670, 3673, 3682, 3690, 3694, 3707, 3716, 3727, 3736, 3737, 3744, 3753, 3765, 3790, 3798, 3799, 3872, 3881, 3885, 3915, 3916, 3922, 3931, 3938, 3969, 4011, 4017, 4056, 4059, 4068, 4076, 4077, 4081, 4082, 4085, 4090, 4106, 4112, 4117, 4144, 4145, 4158, 4159, 4160, 4161, 4162, 4163, 4164, 4165, 4166, 4167, 4168, 4169, 4170, 4171, 4172, 4173, 4174, 4175, 4176, 4179, 4181, 4182, 4201, 4235, 4285, 4288, 4305, 4323, 4333, 4336, 4353, 4398, 4409, 4417, 4421, 4423, 4429, 4435, 4448, 4450, 4469, 4472, 4476, 4482, 4488, 4513, 4518, 4544, 4559, 4560, 4569, 4571, 4578, 4607, 4622, 4631, 4643, 4647, 4648, 4650, 4658, 4669, 4672, 4682, 4687, 4688, 4704, 4718, 4754, 4767, 4786, 4792, 4797, 4804, 4812, 4814, 4823, 4830, 4833, 4838, 4848, 4849, 4859, 4862, and 4872; preferably at least 75% identity, more preferably at least 80% identity, more preferably at least 85% identity, even more preferably at least 90% identity, most preferably at least 95% identity, and even most preferably at least 97% identity with a polynucleotide selected from the group consisting of SEQ ID NOs: 909, 911, 1367, 1498, 2663, 2668, 2682, and 2683; preferably at least 80% identity, more preferably at least 85% identity, even more preferably at least 90% identity, most preferably at least 95% identity, and even most preferably at least 97% identity with a polynucleotide selected from the group consisting of SEQ ID NOs: 167, 654, 2513, 2589, and 2694; preferably at least 85% identity, more preferably at least 90% identity, most preferably at least 95% identity, and even most preferably at least 97% identity with a polynucleotide selected from the group consisting of SEQ ID NOs: 163, 184, 910, 1674, 2412, 2660, 2662, 2695, and 3231; preferably at least 90% identity, more preferably at least 95% identity, and most preferably at least 97% identity with a polynucleotide selected from the group consisting of SEQ ID NOs: 27, 166, 168, 170, 193, 202, 231, 543, 776, 888, 889, 890, 898, 908, 916, 1028, 1123, 1133, 1155, 1156, 1157, 1173, 1211, 1212, 1218, 1229, 1230, 1277, 1356, 1357, 1359, 1360, 1368, 1372, 1391, 1500, 1584, 1604, 1627, 1631, 1632, 1637, 1648, 1680, 2101, 2102, 2239, 2358, 2359, 2360, 2404, 2417, 2429, 2494, 2563, 2678, 2724, 3111, 3539, 3850, 4078, 4079, 4080, 4083, 4084, 4180, 4221, 4642, 4689, 4707, and 4727; or preferably at least 95% identity and more preferably at least 97% identity with a polynucleotide selected from the group consisting of SEQ ID NOs: 2, 3, 4, 5, 6, 7, 8, 9, 10, 11, 12, 13, 14, 15, 16, 17, 18, 19, 20, 21, 22, 23, 24, 25, 26, 28, 29, 30, 31, 32, 33, 34, 35, 36, 37, 38, 39, 40, 41, 42, 43, 44, 45, 46, 47, 48, 49, 51, 52, 53, 54, 56, 57, 58, 59, 60, 61, 62, 63, 64, 65, 66, 67, 68, 69, 70, 71, 72, 73, 74, 75, 76, 78, 79, 80, 81, 83, 84, 85, 86, 87, 88, 89, 90, 92, 93, 94, 95, 96, 97, 99, 100, 101, 102, 104, 105, 106, 107, 108, 109, 111, 112, 113, 114, 115, 116, 117, 118, 119, 120, 121, 122, 123, 124, 126, 127, 128, 129, 130, 131, 132, 133, 134, 135, 136, 137, 138, 139, 140, 141, 142, 143, 144, 145, 146, 147, 148, 149, 150, 151, 152, 153, 154, 155, 156, 157, 158, 159, 160, 161, 162, 164, 165, 173, 175, 188, 190, 191, 197, 200, 224, 232, 233, 234, 235, 236, 237, 238, 239, 267, 268, 269, 270, 271, 272, 273, 274, 275, 276, 277, 278, 279, 280, 281, 282, 283, 284, 285, 286, 288, 289, 290, 291, 292, 293, 294, 295, 296, 297, 298, 299, 300, 301, 302, 303, 304, 305, 307, 309, 310, 311, 312, 313, 314, 315, 316, 317, 318, 319, 320, 321, 324, 325, 326, 327, 328, 330, 331, 332, 333, 334, 335, 336, 337, 338, 339, 340, 341, 342, 343, 344, 345, 346, 347, 348, 349, 351, 352, 353, 355, 356, 357, 358, 359, 361, 362, 364, 365, 366, 368, 369, 370, 371, 372, 373, 374, 375, 376, 377, 378, 379, 380, 382, 383, 384, 385, 386, 387, 388, 389, 390, 391, 392, 393, 394, 395, 396, 397, 398, 399, 400, 401, 402, 403, 404, 405, 406, 407, 408, 409, 410, 411, 412, 413, 414, 415, 416, 417, 418, 419, 420, 421, 422, 423, 424, 425, 426, 427, 428, 429, 430, 431, 432, 433, 434, 435, 436, 437, 438, 439, 440, 441, 442, 443, 444, 446, 447, 448, 449, 450, 451, 452, 453, 454, 455, 456, 457, 458, 459, 460, 461, 462, 463, 464, 465, 466, 467, 468, 470, 471, 472, 473, 474, 475, 476, 477, 478, 479, 480, 481, 482, 483, 484, 485, 486, 489, 490, 491, 492, 493, 494, 495, 496, 497, 498, 499, 500, 501, 502, 503, 504, 505, 506, 507, 508, 509, 510, 511, 512, 513, 514, 515, 517, 518, 519, 520, 521, 522, 525, 526, 527, 528, 529, 530, 531, 532, 533, 534, 535, 536, 538, 539, 540, 542, 544, 545, 546, 547, 548, 549, 550, 551, 552, 553, 554, 555, 556, 557, 558, 559, 560, 561, 562, 563, 564, 565, 566, 567, 568, 569, 570, 571, 572, 573, 574, 576, 577, 578, 579, 580, 581, 582, 583, 584, 585, 586, 587, 588, 589, 590, 591, 593, 594, 595, 596, 597, 598, 599, 600, 601, 602, 603, 604, 605, 606, 608, 609, 610, 611, 612, 613, 614, 615, 616, 617, 618, 619, 620, 622, 623, 624, 625, 626, 629, 630, 631, 632, 633, 634, 635, 636, 637, 638, 639, 640, 641, 642, 643, 644, 645, 646, 647, 648, 649, 650, 651, 652, 653, 655, 656, 657, 658, 659, 660, 661, 662, 663, 664, 665, 667, 668, 669, 670, 671, 673, 674, 675, 676, 677, 678, 679, 680, 681, 682, 683, 684, 685, 686, 687, 689, 690, 692, 693, 694, 695, 696, 697, 698, 699, 700, 701, 703, 704, 705, 706, 707, 708, 709, 711, 712, 713, 714, 715, 716, 717, 718, 720, 721, 722, 723, 724, 725, 727, 728, 730, 731, 732, 733, 734, 735, 736, 737, 738, 739, 740, 741, 742, 743, 744, 745, 746, 747, 749, 750, 752, 753, 754, 755, 756, 757, 758, 759, 760, 761, 762, 763, 764, 765, 766, 767, 768, 769, 770, 771, 772, 775, 778, 779, 780, 781, 782, 783, 784, 785, 786, 787, 788, 789, 790, 792, 793, 794, 795, 796, 797, 798, 799, 800, 801, 802, 803, 804, 805, 806, 807, 808, 809, 810, 811, 812, 813, 814, 815, 816, 817, 818, 819, 820, 821, 822, 823, 824, 825, 826, 827, 828, 829, 830, 832, 834, 835, 836, 837, 838, 839, 840, 841, 843, 844, 845, 846, 852, 853, 854, 856, 858, 859, 860, 861, 862, 863, 864, 865, 866, 867, 868, 869, 870, 871, 872, 873, 874, 875, 876, 877, 878, 879, 880, 881, 882, 883, 884, 891, 892, 893, 894, 895, 896, 897, 899, 900, 902, 903, 904, 905, 906, 907, 912, 913, 914, 915, 917, 918, 919, 920, 921, 922, 923, 924, 925, 926, 927, 928, 929, 930, 931, 932, 933, 934, 935, 936, 937, 938, 939, 940, 941, 942, 943, 945, 946, 947, 948, 949, 950, 951, 952, 953, 954, 955, 956, 957, 958, 959, 960, 961, 962, 963, 964, 965, 966, 967, 968, 969, 970, 971, 972, 973, 974, 975, 976, 977, 978, 979, 980, 981, 983, 984, 985, 986, 987, 988, 989, 990, 992, 993, 995, 996, 997, 998, 999, 1000, 1001, 1002, 1003, 1004, 1005, 1006, 1007, 1008, 1009, 1010, 1011, 1012, 1013, 1014, 1015, 1016, 1017, 1019, 1020, 1021, 1022, 1023, 1024, 1025, 1026, 1027, 1029, 1030, 1031, 1033, 1035, 1036, 1037, 1038, 1039, 1040, 1041, 1042, 1043, 1044, 1045, 1046, 1047, 1048, 1049, 1050, 1051, 1052, 1053, 1054, 1055, 1056, 1057, 1059, 1060, 1061, 1062, 1063, 1064, 1065, 1066, 1067, 1068, 1069, 1070, 1071, 1072, 1073, 1074, 1075, 1076, 1077, 1079, 1080, 1081, 1082, 1083, 1084, 1085, 1086, 1087, 1089, 1090, 1091, 1092, 1093, 1094, 1095, 1096, 1097, 1099, 1100, 1101, 1102, 1103, 1104, 1105, 1106, 1107, 1109, 1110, 1111, 1113, 1114, 1115, 1116, 1117, 1118, 1119, 1120, 1121, 1122, 1124, 1125, 1126, 1127, 1129, 1130, 1131, 1132, 1134, 1135, 1136, 1137, 1138, 1139, 1140, 1141, 1142, 1143, 1144, 1145, 1146, 1147, 1149, 1150, 1151, 1152, 1159, 1161, 1162, 1163, 1165, 1166, 1167, 1168, 1169, 1170, 1171, 1172, 1174, 1178, 1179, 1182, 1185, 1186, 1187, 1188, 1189, 1190, 1191, 1192, 1195, 1196, 1197, 1198, 1200, 1201, 1202, 1203, 1204, 1205, 1206, 1207, 1208, 1209, 1210, 1213, 1214, 1215, 1216, 1217, 1219, 1220, 1221, 1223, 1224, 1225, 1226, 1227, 1228, 1231, 1232, 1233, 1234, 1235, 1236, 1238, 1239, 1240, 1241, 1242, 1243, 1245, 1246, 1247, 1248, 1249, 1250, 1251, 1252, 1253, 1254, 1255, 1256, 1257, 1258, 1259, 1260, 1261, 1264, 1267, 1268, 1269, 1270, 1271, 1272, 1273, 1274, 1275, 1276, 1279, 1280, 1281, 1282, 1283, 1284, 1285, 1286, 1287, 1288, 1289, 1290, 1291, 1292, 1293, 1294, 1295, 1296, 1297, 1298, 1299, 1300, 1301, 1303, 1304, 1305, 1306, 1307, 1308, 1309, 1310, 1311, 1312, 1319, 1320, 1321, 1322, 1323, 1324, 1325, 1326, 1327, 1328, 1329, 1330, 1331, 1332, 1333, 1334, 1335, 1336, 1337, 1338, 1339, 1340, 1341, 1342, 1343, 1344, 1346, 1347, 1348, 1349, 1350, 1351, 1352, 1353, 1354, 1358, 1361, 1362, 1363, 1364, 1365, 1366, 1369, 1370, 1371, 1375, 1376, 1377, 1378, 1379, 1380, 1381, 1382, 1383, 1384, 1385, 1386, 1387, 1388, 1389, 1390, 1392, 1393, 1394, 1395, 1396, 1397, 1398, 1399, 1400, 1402, 1403, 1404, 1405, 1406, 1407, 1408, 1409, 1410, 1411, 1412, 1413, 1414, 1415, 1416, 1417, 1418, 1419, 1420, 1421, 1422, 1423, 1425, 1426, 1427, 1428, 1429, 1430, 1431, 1434, 1435, 1436, 1437, 1438, 1439, 1441, 1443, 1444, 1445, 1446, 1447, 1449, 1450, 1451, 1452, 1453, 1454, 1456, 1457, 1458, 1459, 1460, 1461, 1462, 1463, 1464, 1465, 1466, 1467, 1468, 1469, 1471, 1472, 1473, 1474, 1475, 1476, 1477, 1478, 1479, 1480, 1481, 1482, 1483, 1484, 1485, 1486, 1487, 1488, 1489, 1490, 1491, 1492, 1493, 1494, 1495, 1499, 1502, 1503, 1504, 1505, 1506, 1507, 1508, 1510, 1511, 1512, 1513, 1514, 1515, 1516, 1517, 1518, 1519, 1520, 1521, 1522, 1523, 1524, 1525, 1526, 1528, 1529, 1530, 1531, 1532, 1533, 1534, 1535, 1536, 1537, 1538, 1540, 1541, 1542, 1543, 1544, 1545, 1546, 1547, 1548, 1549, 1550, 1551, 1552, 1553, 1554, 1555, 1557, 1558, 1559, 1560, 1561, 1562, 1563, 1564, 1566, 1567, 1568, 1569, 1570, 1571, 1572, 1573, 1574, 1575, 1576, 1577, 1578, 1579, 1580, 1581, 1582, 1583, 1585, 1586, 1587, 1588, 1590, 1591, 1592, 1593, 1594, 1595, 1596, 1597, 1598, 1599, 1600, 1601, 1602, 1603, 1605, 1606, 1607, 1608, 1609, 1610, 1611, 1612, 1613, 1614, 1615, 1616, 1617, 1618, 1620, 1621, 1622, 1623, 1624, 1625, 1626, 1628, 1633, 1656, 1678, 1681, 1682, 1683, 1685, 1686, 1687, 1689, 1690, 1691, 1693, 1695, 1696, 1697, 1698, 1699, 1700, 1701, 1702, 1705, 1706, 1707, 1708, 1709, 1710, 1711, 1712, 1713, 1714, 1715, 1716, 1717, 1718, 1719, 1720, 1721, 1722, 1723, 1724, 1725, 1726, 1727, 1729, 1730, 1731, 1733, 1735, 1737, 1738, 1739, 1740, 1741, 1742, 1743, 1744, 1745, 1746, 1747, 1748, 1749, 1750, 1751, 1752, 1753, 1754, 1755, 1756, 1757, 1758, 1759, 1760, 1761, 1762, 1763, 1764, 1765, 1766, 1767, 1768, 1769, 1770, 1771, 1772, 1773, 1774, 1776, 1777, 1778, 1779, 1780, 1781, 1782, 1784, 1785, 1786, 1787, 1788, 1789, 1790, 1791, 1792, 1793, 1794, 1795, 1796, 1797, 1798, 1799, 1800, 1801, 1802, 1803, 1804, 1805, 1806, 1807, 1808, 1809, 1810, 1811, 1812, 1813, 1814, 1815, 1817, 1818, 1819, 1820, 1821, 1822, 1823, 1824, 1825, 1826, 1827, 1828, 1829, 1830, 1832, 1833, 1834, 1835, 1836, 1837, 1839, 1840, 1841, 1842, 1843, 1844, 1845, 1846, 1847, 1848, 1849, 1850, 1852, 1854, 1855, 1856, 1857, 1858, 1859, 1860, 1861, 1862, 1863, 1864, 1865, 1867, 1868, 1869, 1870, 1871, 1872, 1873, 1874, 1875, 1876, 1877, 1878, 1879, 1880, 1881, 1882, 1883, 1884, 1885, 1886, 1888, 1889, 1890, 1891, 1892, 1893, 1894, 1895, 1896, 1897, 1898, 1899, 1900, 1901, 1902, 1903, 1904, 1905, 1906, 1907, 1908, 1909, 1910, 1911, 1912, 1913, 1914, 1915, 1916, 1917, 1918, 1919, 1920, 1921, 1922, 1923, 1924, 1925, 1926, 1927, 1928, 1929, 1930, 1931, 1932, 1933, 1934, 1935, 1936, 1937, 1938, 1939, 1940, 1941, 1942, 1943, 1944, 1945, 1946, 1947, 1948, 1949, 1950, 1951, 1952, 1953, 1954, 1955, 1956, 1957, 1958, 1959, 1960, 1961, 1962, 1963, 1964, 1965, 1966, 1967, 1968, 1969, 1970, 1971, 1972, 1973, 1974, 1975, 1976, 1977, 1978, 1979, 1980, 1981, 1982, 1983, 1984, 1985, 1986, 1987, 1988, 1989, 1990, 1991, 1992, 1993, 1994, 1995, 1996, 1997, 1998, 1999, 2000, 2001, 2003, 2004, 2005, 2006, 2008, 2009, 2010, 2011, 2012, 2013, 2014, 2015, 2016, 2017, 2018, 2019, 2020, 2021, 2023, 2024, 2025, 2026, 2027, 2028, 2029, 2030, 2031, 2032, 2033, 2034, 2035, 2036, 2037, 2039, 2040, 2041, 2042, 2043, 2045, 2046, 2047, 2048, 2049, 2050, 2051, 2052, 2053, 2054, 2055, 2056, 2057, 2058, 2059, 2060, 2061, 2062, 2063, 2064, 2065, 2066, 2068, 2069, 2071, 2073, 2074, 2075, 2077, 2078, 2079, 2080, 2081, 2082, 2083, 2084, 2085, 2086, 2087, 2088, 2089, 2090, 2091, 2092, 2093, 2095, 2096, 2097, 2098, 2099, 2100, 2103, 2104, 2105, 2107, 2108, 2109, 2110, 2111, 2112, 2113, 2114, 2115, 2116, 2117, 2118, 2122, 2123, 2125, 2126, 2127, 2128, 2129, 2130, 2132, 2133, 2134, 2135, 2136, 2137, 2138, 2140, 2141, 2142, 2143, 2144, 2145, 2146, 2149, 2150, 2151, 2152, 2153, 2154, 2155, 2156, 2157, 2158, 2159, 2160, 2161, 2162, 2163, 2164, 2165, 2167, 2168, 2169, 2170, 2172, 2173, 2174, 2175, 2176, 2177, 2178, 2179, 2180, 2181, 2182, 2183, 2184, 2185, 2186, 2187, 2188, 2189, 2190, 2191, 2192, 2193, 2195, 2197, 2199, 2200, 2201, 2202, 2203, 2204, 2206, 2207, 2208, 2209, 2210, 2212, 2214, 2215, 2217, 2218, 2219, 2220, 2222, 2223, 2224, 2225, 2226, 2227, 2228, 2229, 2231, 2232, 2233, 2234, 2235, 2237, 2238, 2242, 2243, 2244, 2245, 2246, 2247, 2248, 2249, 2250, 2251, 2252, 2253, 2254, 2256, 2257, 2259, 2260, 2261, 2262, 2264, 2265, 2266, 2267, 2268, 2269, 2270, 2271, 2272, 2274, 2275, 2276, 2278, 2279, 2280, 2281, 2282, 2283, 2284, 2285, 2287, 2306, 2307, 2308, 2309, 2310, 2311, 2312, 2313, 2314, 3231, 2316, 2317, 2318, 2319, 2320, 2321, 2322, 2323, 2325, 2326, 2328, 2329, 2330, 2331, 2332, 2333, 2334, 2335, 2336, 2338, 2339, 2340, 2342, 2343, 2344, 2345, 2346, 2348, 2349, 2350, 2352, 2353, 2354, 2355, 2356, 2357, 2361, 2362, 2363, 2365, 2366, 2367, 2368, 2369, 2370, 2371, 2372, 2373, 2374, 2375, 2376, 2377, 2378, 2379, 2380, 2382, 2383, 2384, 2385, 2386, 2387, 2389, 2390, 2391, 2392, 2393, 2394, 2395, 2396, 2397, 2398, 2399, 2401, 2402, 2405, 2406, 2407, 2409, 2413, 2416, 2418, 2419, 2420, 2421, 2422, 2423, 2426, 2427, 2428, 2431, 2432, 2433, 2434, 2436, 2437, 2438, 2440, 2441, 2442, 2443, 2444, 2445, 2446, 2447, 2448, 2449, 2450, 2451, 2452, 2453, 2454, 2455, 2456, 2458, 2459, 2460, 2461, 2462, 2463, 2464, 2465, 2466, 2470, 2471, 2472, 2473, 2474, 2475, 2476, 2477, 2478, 2479, 2480, 2481, 2482, 2484, 2485, 2486, 2487, 2488, 2489, 2490, 2492, 2493, 2495, 2496, 2497, 2499, 2500, 2501, 2502, 2503, 2523, 2687, 3231, 2700, 2701, 2702, 2703, 2704, 2705, 2707, 2708, 2709, 2710, 2711, 2712, 2713, 2714, 2715, 2716, 2717, 2718, 2719, 2720, 2721, 2722, 2725, 2726, 2727, 2728, 2729, 2731, 2732, 2734, 2735, 2736, 2737, 2738, 2739, 2740, 2741, 2742, 2743, 2744, 2745, 2746, 2747, 2748, 2749, 2750, 2752, 2753, 2754, 2755, 2756, 2757, 2758, 2759, 2760, 2761, 2763, 2764, 2765, 2766, 2767, 2768, 2769, 2770, 2771, 2772, 2773, 2774, 2775, 2776, 2777, 2778, 2779, 2780, 2781, 2782, 2783, 2784, 2785, 2786, 2787, 2788, 2789, 2790, 2791, 2792, 2793, 2794, 2796, 2797, 2798, 2799, 2800, 2801, 2802, 2803, 2804, 2805, 2807, 2808, 2809, 2810, 2811, 2812, 2814, 2815, 2816, 2817, 2818, 2819, 2820, 2821, 2822, 2823, 2824, 2825, 2826, 2827, 2828, 2829, 2830, 2831, 2832, 2833, 2836, 2837, 2838, 2839, 2840, 2842, 2843, 2844, 2845, 2846, 2847, 2848, 2849, 2851, 2852, 2853, 2854, 2855, 2856, 2857, 2858, 2859, 2860, 2861, 2862, 2863, 2864, 2865, 2868, 2869, 2870, 2871, 2872, 2873, 2875, 2876, 2877, 2879, 2880, 2881, 2882, 2883, 2884, 2885, 2886, 2887, 2888, 2889, 2890, 2891, 2892, 2893, 2894, 2895, 2896, 2897, 2899, 2900, 2901, 2903, 2905, 2906, 2907, 2908, 2909, 2910, 2911, 2912, 2913, 2914, 2915, 2916, 2918, 2919, 2920, 2921, 2922, 2923, 2924, 2925, 2926, 2927, 2928, 2929, 2930, 2931, 2932, 2933, 2934, 2935, 2936, 2937, 2938, 2939, 2940, 2941, 2942, 2943, 2944, 2945, 2946, 2948, 2949, 2950, 2951, 2952, 2953, 2954, 2955, 2956, 2958, 2959, 2961, 2962, 2963, 2964, 2965, 2966, 2967, 2968, 2970, 2971, 2974, 2975, 2976, 2977, 2978, 2979, 2980, 2981, 2982, 2983, 2984, 2985, 2986, 2987, 2988, 2989, 2990, 2991, 2992, 2993, 2994, 2995, 2996, 2997, 2998, 3000, 3001, 3002, 3003, 3005, 3006, 3007, 3008, 3009, 3010, 3011, 3012, 3013, 3014, 3015, 3016, 3017, 3018, 3020, 3021, 3022, 3023, 3024, 3025, 3026, 3027, 3029, 3030, 3031, 3032, 3033, 3034, 3035, 3036, 3037, 3038, 3039, 3040, 3041, 3042, 3043, 3044, 3045, 3046, 3047, 3048, 3049, 3050, 3051, 3052, 3053, 3055, 3056, 3057, 3058, 3059, 3060, 3061, 3062, 3063, 3065, 3066, 3067, 3068, 3069, 3070, 3071, 3072, 3073, 3074, 3075, 3076, 3077, 3078, 3079, 3080, 3081, 3083, 3084, 3085, 3086, 3087, 3088, 3089, 3090, 3091, 3092, 3094, 3095, 3096, 3097, 3098, 3099, 3100, 3101, 3102, 3103, 3104, 3105, 3106, 3107, 3108, 3109, 3110, 3112, 3113, 3114, 3115, 3116, 3117, 3118, 3119, 3120, 3121, 3122, 3124, 3125, 3126, 3127, 3128, 3129, 3130, 3131, 3132, 3151, 3152, 3153, 3154, 3155, 3156, 3157, 3158, 3159, 3160, 3161, 3163, 3164, 3165, 3166, 3167, 3168, 3169, 3170, 3171, 3172, 3173, 3174, 3175, 3176, 3177, 3178, 3179, 3180, 3181, 3182, 3183, 3184, 3185, 3186, 3187, 3188, 3189, 3190, 3191, 3192, 3193, 3194, 3195, 3196, 3197, 3198, 3199, 3200, 3201, 3202, 3203, 3204, 3205, 3206, 3207, 3208, 3209, 3210, 3211, 3212, 3213, 3214, 3215, 3216, 3217, 3218, 3219, 3220, 3221, 3223, 3232, 3233, 3234, 3235, 3236, 3237, 3238, 3239, 3240, 3241, 3242, 3243, 3245, 3246, 3247, 3249, 3250, 3251, 3252, 3253, 3254, 3255, 3256, 3257, 3258, 3260, 3261, 3262, 3263, 3266, 3267, 3268, 3269, 3270, 3271, 3272, 3273, 3274, 3275, 3276, 3277, 3278, 3279, 3280, 3281, 3282, 3283, 3284, 3285, 3286, 3288, 3289, 3290, 3292, 3293, 3294, 3295, 3296, 3297, 3298, 3299, 3300, 3301, 3302, 3304, 3305, 3306, 3307, 3308, 3309, 3312, 3313, 3314, 3315, 3316, 3317, 3318, 3319, 3320, 3322, 3323, 3325, 3326, 3327, 3328, 3329, 3330, 3331, 3332, 3333, 3334, 3335, 3336, 3337, 3338, 3339, 3340, 3341, 3342, 3343, 3344, 3345, 3346, 3347, 3348, 3349, 3350, 3351, 3352, 3353, 3354, 3356, 3357, 3358, 3359, 3360, 3361, 3363, 3364, 3365, 3366, 3367, 3368, 3369, 3370, 3372, 3373, 3374, 3375, 3376, 3377, 3378, 3379, 3380, 3381, 3382, 3383, 3384, 3385, 3386, 3387, 3388, 3389, 3390, 3391, 3392, 3393, 3394, 3395, 3396, 3397, 3398, 3399, 3400, 3401, 3402, 3403, 3404, 3405, 3406, 3407, 3408, 3409, 3410, 3411, 3412, 3413, 3414, 3415, 3416, 3417, 3418, 3419, 3420, 3421, 3422, 3423, 3424, 3425, 3426, 3427, 3428, 3430, 3431, 3432, 3433, 3435, 3436, 3437, 3438, 3439, 3440, 3441, 3443, 3444, 3445, 3447, 3448, 3449, 3450, 3451, 3452, 3453, 3454, 3455, 3456, 3457, 3459, 3460, 3461, 3462, 3463, 3464, 3465, 3466, 3467, 3468, 3469, 3470, 3472, 3473, 3474, 3475, 3476, 3477, 3478, 3479, 3480, 3481, 3482, 3483, 3484, 3485, 3487, 3488, 3489, 3490, 3491, 3492, 3493, 3494, 3495, 3497, 3498, 3500, 3501, 3502, 3505, 3506, 3507, 3509, 3510, 3511, 3512, 3513, 3514, 3515, 3516, 3517, 3518, 3519, 3520, 3521, 3522, 3523, 3524, 3525, 3526, 3527, 3528, 3529, 3530, 3531, 3532, 3533, 3534, 3535, 3536, 3537, 3538, 3540, 3541, 3542, 3543, 3544, 3545, 3546, 3547, 3548, 3550, 3551, 3552, 3553, 3554, 3555, 3556, 3557, 3559, 3560, 3561, 3562, 3563, 3564, 3565, 3566, 3567, 3568, 3569, 3570, 3571, 3572, 3573, 3574, 3575, 3576, 3578, 3579, 3580, 3581, 3582, 3583, 3584, 3585, 3586, 3587, 3588, 3589, 3590, 3591, 3592, 3594, 3595, 3596, 3597, 3599, 3600, 3602, 3604, 3605, 3607, 3608, 3609, 3610, 3612, 3613, 3614, 3615, 3616, 3617, 3618, 3619, 3620, 3621, 3622, 3623, 3624, 3625, 3626, 3627, 3628, 3629, 3630, 3631, 3632, 3633, 3634, 3635, 3636, 3637, 3638, 3639, 3640, 3641, 3643, 3644, 3645, 3646, 3647, 3648, 3649, 3650, 3651, 3652, 3654, 3656, 3657, 3658, 3659, 3660, 3661, 3662, 3663, 3664, 3665, 3666, 3667, 3668, 3669, 3671, 3672, 3674, 3675, 3676, 3677, 3678, 3679, 3680, 3681, 3683, 3684, 3685, 3686, 3687, 3688, 3689, 3691, 3692, 3693, 3695, 3696, 3697, 3698, 3699, 3700, 3701, 3702, 3703, 3704, 3705, 3706, 3708, 3709, 3710, 3711, 3712, 3713, 3714, 3715, 3717, 3718, 3719, 3720, 3721, 3722, 3723, 3724, 3725, 3726, 3728, 3729, 3730, 3731, 3732, 3733, 3734, 3735, 3738, 3739, 3740, 3741, 3742, 3743, 3745, 3746, 3747, 3748, 3749, 3750, 3751, 3752, 3754, 3755, 3756, 3757, 3758, 3759, 3760, 3761, 3762, 3763, 3764, 3766, 3767, 3768, 3769, 3770, 3771, 3772, 3773, 3774, 3775, 3776, 3777, 3778, 3779, 3780, 3781, 3782, 3783, 3784, 3785, 3786, 3787, 3788, 3789, 4463, 3792, 3793, 3794, 3795, 3796, 3797, 3800, 3801, 3802, 3803, 3804, 3805, 3806, 3807, 3808, 3809, 3810, 3811, 3812, 3813, 3814, 3815, 3816, 3817, 3818, 3819, 3820, 3821, 3822, 3823, 3824, 3825, 3826, 3827, 3828, 3829, 3830, 3831, 3832, 3833, 3834, 3835, 3837, 3838, 3839, 3840, 3841, 3842, 3843, 3844, 3845, 3846, 3847, 3848, 3849, 3851, 3852, 3853, 3854, 3855, 3856, 3857, 3858, 3859, 3860, 3861, 3862, 3863, 3864, 3865, 3866, 3867, 3868, 3869, 3870, 3871, 3873, 3874, 3875, 3876, 3877, 3878, 3879, 3880, 3882, 3883, 3884, 3886, 3887, 3888, 3889, 3890, 3891, 3892, 3893, 3894, 3895, 3896, 3897, 3898, 3899, 3900, 3901, 3902, 3903, 3904, 3905, 3906, 3907, 3908, 3909, 3910, 3911, 3912, 3913, 3914, 3917, 3918, 3919, 3920, 3921, 3923, 3924, 3925, 3926, 3927, 3928, 3929, 3930, 3932, 3933, 3934, 3935, 3936, 3937, 3939, 3940, 3941, 3942, 3943, 3944, 3945, 3946, 3947, 3948, 3949, 3950, 3951, 3952, 3953, 3954, 3955, 3956, 3957, 3958, 3959, 3960, 3961, 3962, 3963, 3964, 3965, 3966, 3967, 3968, 3970, 3971, 3972, 3973, 3974, 3975, 3976, 3977, 3978, 3979, 3980, 3981, 3982, 3983, 3984, 3985, 3986, 3987, 3988, 3989, 3990, 3991, 3992, 3993, 3994, 3995, 3996, 3997, 3998, 3999, 4000, 4001, 4002, 4003, 4004, 4005, 4006, 4007, 4008, 4009, 4010, 4012, 4013, 4014, 4015, 4016, 4018, 4019, 4020, 4021, 4022, 4023, 4024, 4025, 4026, 4027, 4028, 4029, 4030, 4031, 4032, 4033, 4034, 4035, 4036, 4037, 4038, 4039, 4040, 4041, 4042, 4043, 4044, 4045, 4046, 4047, 4048, 4049, 4050, 4051, 4052, 4053, 4054, 4055, 4057, 4058, 4060, 4061, 4062, 4063, 4064, 4065, 4066, 4067, 4069, 4070, 4071, 4072, 4073, 4074, 4075, 4086, 4087, 4088, 4089, 4091, 4092, 4093, 4094, 4095, 4096, 4097, 4098, 4099, 4100, 4101, 4102, 4103, 4104, 4105, 4107, 4108, 4109, 4110, 4111, 4113, 4114, 4115, 4116, 4118, 4119, 4120, 4121, 4122, 4123, 4124, 4125, 4126, 4127, 4128, 4129, 4130, 4131, 4132, 4133, 4134, 4135, 4136, 4137, 4138, 4139, 4140, 4141, 4142, 4143, 4146, 4147, 4148, 4149, 4150, 4151, 4152, 4153, 4154, 4155, 4156, 4157, 4177, 4178, 4183, 4184, 4185, 4186, 4187, 4188, 4189, 4190, 4191, 4192, 4193, 4194, 4195, 4196, 4197, 4198, 4199, 4200, 4202, 4203, 4204, 4205, 4206, 4207, 4208, 4209, 4210, 4211, 4212, 4213, 4214, 4215, 4216, 4217, 4218, 4219, 4220, 4222, 4223, 4224, 4225, 4226, 4227, 4228, 4229, 4230, 4231, 4232, 4233, 4234, 4236, 4237, 4238, 4239, 4240, 4241, 4242, 4243, 4244, 4245, 4246, 4247, 4248, 4249, 4250, 4251, 4252, 4253, 4254, 4255, 4256, 4257, 4258, 4259, 4260, 4261, 4262, 4263, 4264, 4265, 4266, 4267, 4268, 4269, 4270, 4271, 4272, 4273, 4274, 4275, 4276, 4277, 4278, 4279, 4280, 4281, 4282, 4283, 4284, 4286, 4287, 4289, 4290, 4291, 4292, 4293, 4294, 4295, 4296, 4297, 4298, 4299, 4300, 4301, 4302, 4303, 4304, 4306, 4307, 4308, 4309, 4310, 4311, 4312, 4313, 4314, 4315, 4316, 4317, 4318, 4319, 4320, 4321, 4322, 4324, 4325, 4326, 4327, 4328, 4329, 4330, 4331, 4332, 4334, 4335, 4337, 4338, 4339, 4340, 4341, 4342, 4343, 4344, 4345, 4346, 4347, 4348, 4349, 4350, 4351, 4352, 4354, 4355, 4356, 4357, 4358, 4359, 4360, 4361, 4362, 4363, 4364, 4365, 4366, 4367, 4368, 4369, 4370, 4371, 4372, 4373, 4374, 4375, 4376, 4377, 4378, 4379, 4380, 4381, 4382, 4383, 4384, 4385, 4386, 4387, 4388, 4389, 4390, 4391, 4392, 4393, 4394, 4395, 4396, 4397, 4399, 4400, 4401, 4402, 4403, 4404, 4405, 4406, 4407, 4408, 4410, 4411, 4412, 4413, 4414, 4415, 4416, 4418, 4419, 4420, 4422, 4424, 4425, 4426, 4427, 4428, 4430, 4431, 4432, 4433, 4434, 4436, 4437, 4438, 4439, 4440, 4441, 4442, 4443, 4444, 4445, 4446, 4447, 4449, 4451, 4452, 4453, 4454, 4455, 4456, 4457, 4458, 4459, 4460, 4461, 4462, 4463, 4464, 4465, 4466, 4467, 4468, 4470, 4471, 4473, 4474, 4475, 4477, 4478, 4479, 4480, 4481, 4483, 4484, 4485, 4486, 4487, 4489, 4490, 4491, 4492, 4493, 4494, 4495, 4496, 4497, 4498, 4499, 4500, 4501, 4502, 4503, 4504, 4505, 4506, 4507, 4508, 4509, 4510, 4511, 4512, 4514, 4515, 4516, 4517, 4519, 4520, 4521, 4522, 4523, 4524, 4525, 4526, 4527, 4528, 4529, 4530, 4531, 4532, 4533, 4534, 4535, 4536, 4537, 4538, 4539, 4540, 4541, 4542, 4543, 4545, 4546, 4547, 4548, 4549, 4550, 4551, 4552, 4553, 4554, 4555, 4556, 4557, 4558, 4561, 4562, 4563, 4564, 4565, 4566, 4567, 4568, 4570, 4572, 4573, 4574, 4575, 4576, 4577, 4579, 4580, 4581, 4582, 4583, 4584, 4585, 4586, 4587, 4588, 4589, 4590, 4591, 4592, 4593, 4594, 4595, 4596, 4597, 4598, 4599, 4600, 4601, 4602, 4603, 4604, 4605, 4606, 4608, 4609, 4610, 4611, 4612, 4613, 4614, 4615, 4616, 4617, 4618, 4619, 4620, 4621, 4623, 4624, 4625, 4626, 4627, 4628, 4629, 4630, 4632, 4633, 4634, 4635, 4636, 4637, 4638, 4639, 4640, 4641, 4644, 4645, 4646, 4649, 4651, 4652, 4653, 4654, 4655, 4656, 4657, 4659, 4660, 4661, 4662, 4663, 4664, 4665, 4666, 4667, 4668, 4670, 4671, 4673, 4674, 4675, 4676, 4677, 4678, 4679, 4680, 4681, 4683, 4684, 4685, 4686, 4690, 4691, 4692, 4693, 4694, 4695, 4696, 4697, 4698, 4699, 4700, 4701, 4702, 4703, 4705, 4706, 4708, 4709, 4710, 4711, 4712, 4713, 4714, 4715, 4716, 4717, 4719, 4720, 4721, 4722, 4723, 4724, 4725, 4726, 4728, 4729, 4730, 4731, 4732, 4733, 4734, 4735, 4736, 4737, 4738, 4739, 4740, 4741, 4742, 4743, 4744, 4745, 4746, 4747, 4748, 4749, 4750, 4751, 4752, 4753, 4755, 4756, 4757, 4758, 4759, 4760, 4761, 4762, 4763, 4764, 4765, 4766, 4768, 4769, 4770, 4771, 4772, 4773, 4774, 4775, 4776, 4777, 4778, 4779, 4780, 4781, 4782, 4783, 4784, 4785, 4787, 4788, 4789, 4790, 4791, 4793, 4794, 4795, 4796, 4798, 4799, 4800, 4801, 4802, 4803, 4805, 4806, 4807, 4808, 4809, 4810, 4811, 4813, 4815, 4816, 4817, 4818, 4819, 4820, 4821, 4822, 4824, 4825, 4826, 4827, 4828, 4829, 4831, 4832, 4834, 4835, 4836, 4837, 4839, 4840, 4841, 4842, 4843, 4844, 4845, 4846, 4847, 4850, 4851, 4852, 4853, 4854, 4855, 4856, 4857, 4858, 4860, 4861, 4863, 4864, 4865, 4866, 4867, 4868, 4869, 4870, 4871, 4873, 4874, 4875, and 4876.

[0068] In a second aspect, the present invention relates to an isolated polynucleotide comprising a nucleotide sequence that hybridizes under very low stringency conditions, preferably low stringency conditions, more preferably medium stringency conditions, more preferably medium-high stringency conditions, even more preferably high stringency conditions, and most preferably very high stringency conditions with any of (i) the polynucleotides of SEQ ID NOs: 2-4876, or subsequences thereof, or (ii) full-length complementary strands thereof (J. Sambrook, E. F. Fritsch, and T. Maniatus, 1989, Molecular Cloning, A Laboratory Manual, 2d edition, Cold Spring Harbor, N.Y.). Subsequences of SEQ ID NOs: 2-4876 may be preferably at least 90 nucleotides, more preferably at least 150 nucleotide, and most preferably at least 200 nucleotides. Moreover, the subsequences may encode fragments of a gene product that have biological activity.

[0069] In a preferred aspect, the present invention relates to an isolated polynucleotide comprising a nucleotide sequence that hybridizes under preferably at least medium stringency conditions, more preferably at least medium-high stringency conditions, or most preferably at least high stringency conditions with a polynucleotide selected from the group consisting of SEQ ID NOs: 2-4876 and full-length complementary strands thereof.

[0070] The nucleotide sequences of SEQ ID NOs: 2-4876 or subsequences thereof, as well as the amino acid sequences of SEQ ID NOs: 4877-9751 or fragments thereof, may be used to design nucleic acid probes to identify and clone DNA encoding biologically active substances from strains of different genera or species according to methods well known in the art. In particular, such probes can be used for hybridization with the genomic DNA of the genus or species of interest, following standard Southern blotting procedures, in order to identify and isolate the corresponding gene therein. Such probes can be considerably shorter than the entire sequence, but should be at least 14, preferably at least 25, more preferably at least 35 nucleotides in length, such as at least 70 nucleotides in length. It is preferred, however, that the nucleic acid probes are at least 100 nucleotides in length. For example, the nucleic acid probes may be at least 200 nucleotides, at least 300 nucleotides, at least 400 nucleotides, or at least 500 nucleotides in length. Even longer probes may be used, e.g., nucleic acid probes that are at least 600 nucleotides, at least 700 nucleotides, at least 800 nucleotides, or at least 900 nucleotides in length. Both DNA and RNA probes can be used. The probes are typically labeled for detecting the corresponding gene (for example, with ³²P, ³H, ³⁵S, biotin, or avidin). Such probes are encompassed by the present invention.

[0071] A genomic DNA library prepared from such other organisms may, therefore, be screened for DNA that hybridizes with the probes described above and encodes a biologically active substance. Genomic DNA from such other organisms may be separated by agarose or polyacrylamide gel electrophoresis, or other separation techniques. DNA from the libraries or the separated DNA may be transferred to and immobilized on nitrocellulose or other suitable carrier material. In order to identify a clone or DNA that is homologous with any of SEQ ID NOs: 2-4876 or subsequences thereof, the carrier material is used in a Southern blot.

[0072] For purposes of the present invention, hybridization indicates that a polynucleotide hybridizes to a labeled gene having the nucleotide sequence shown in any of SEQ ID NOs: 2-4876, full-length complementary strands thereof, or subsequences thereof, under very low to very high stringency conditions. Molecules to which the nucleic acid probe hybridizes under these conditions can be detected using X-ray film.

[0073] In a preferred aspect, the nucleic acid probe is any of the polynucleotides of SEQ ID NOs: 2-4876, or subsequences thereof. In another preferred aspect, the nucleic acid probe is the mature polypeptide coding region of any of the polynucleotides of SEQ ID NOs: 2-4876. In another preferred aspect, the nucleic acid probe is the polynucleotide of any of SEQ ID NOs: 2-4876 contained in chromosome of Bacillus licheniformis SJ1904. In another preferred aspect, the nucleic acid probe is the mature polypeptide coding region of any of the polynucleotides of SEQ ID NOs: 2-4876 contained in Bacillus licheniformis SJ1904.

[0074] For long probes of at least 100 nucleotides in length, very low to very high stringency conditions are defined as prehybridization and hybridization at 42° C. in 5×SSPE, 0.3% SDS, 200 μg/ml sheared and denatured salmon sperm DNA, and either 25% formamide for very low and low stringencies, 35% formamide for medium and medium-high stringencies, or 50% formamide for high and very high stringencies, following standard Southern blotting procedures.

[0075] For long probes of at least 100 nucleotides in length, the carrier material is finally washed three times each for 15 minutes using 2×SSC, 0.2% SDS preferably at least at 45° C. (very low stringency), more preferably at least at 50° C. (low stringency), more preferably at least at 55° C. (medium stringency), more preferably at least at 60° C. (medium-high stringency), even more preferably at least at 65° C. (high stringency), and most preferably at least at 70° C. (very high stringency).

[0076] For short probes of about 14 nucleotides to about 70 nucleotides in length, stringency conditions are defined as prehybridization, hybridization, and washing post-hybridization at about 5° C. to about 10° C. below the calculated Tₘ using the calculation according to Bolton and McCarthy (1962, Proceedings of the National Academy of Sciences USA 48:1390) in 0.9 M NaCl, 0.09 M Tris-HCl pH 7.6, 6 mM EDTA, 0.5% NP-40, 1×Denhardt's solution, 1 mM sodium pyrophosphate, 1 mM sodium monobasic phosphate, 0.1 mM ATP, and 0.2 mg of yeast RNA per ml following standard Southern blotting procedures.

[0077] For short probes of about 14 nucleotides to about 70 nucleotides in length, the carrier material is washed once in 6×SCC plus 0.1% SDS for 15 minutes and twice each for 15 minutes using 6×SSC at 5° C. to 10° C. below the calculated Tₘ.

[0078] Under salt-containing hybridization conditions, the effective Tₘ is what controls the degree of sequence identity required between the probe and the filter bound DNA for successful hybridization. The effective Tₘ may be determined using the formula below to determine the degree of sequence identity required for two DNAs to hybridize under various stringency conditions.

Effective Tₘ=81.5+0.16.6(log M[Na⁺])+0.41(% G+C)−0.72(% formamide)

[0079] The % G+C content of any of the polynucleotides of SEQ ID NOs: 2-4876 can easily be determined. For medium stringency, for example, the concentration of formamide is 35% and the Na⁺ concentration for 5×SSPE is 0.75 M. Applying this formula to these values, the Effective Tₘ in ° C. can be calculated. Another relevant relationship is that a 1% mismatch of two DNAs lowers the Tₘ 1.4° C. To determine the degree of sequence identity required for two DNAs to hybridize under medium stringency conditions at 42° C., the following formula is used:

% Homology=100−[(Effective Tₘ−Hybridization Temperature)/1.4]

[0080] Applying this formula, the degree of sequence identity required for two DNAs to hybridize under medium stringency conditions at 42° C. can be calculated.

[0081] Similar calculations can be made under other stringency conditions, as defined herein.

[0082] The present invention also relates to isolated polynucleotides obtained by (a) hybridizing a population of DNA under very low, low, medium, medium-high, high, or very high stringency conditions with any of (i) the polynucleotides of SEQ ID NOs: 2-4876, or subsequences thereof, or (ii) full-length complementary strands thereof; and (b) isolating the hybridizing polynucleotide from the population of DNA. In a preferred aspect, the hybridizing polynucleotide encodes a polypeptide of any of SEQ ID NOs: 2-4876, or homologous polypeptides thereof.

[0083] In a preferred aspect, the present invention relates to isolated polynucleotides obtained by (a) hybridizing a population of DNA under preferably at least medium stringency conditions, more preferably at least medium-high stringency conditions, or most preferably at least high stringency conditions with a polynucleotide selected from the group consisting of SEQ ID NOs: 2-4876 and full-length complementary strands thereof; and (b) isolating the hybridizing polynucleotide from the population of DNA.

[0084] In a third aspect, the present invention relates to an isolated polynucleotide encoding a biologically active substance comprising an amino acid sequence having preferably at least 60% identity, more preferably at least 65% identity, more preferably at least 70% identity, more preferably at least 75% identity, more preferably at least 80% identity, more preferably at least 85% identity, more preferably at least 90% identity, even more preferably at least 90% identity, most preferably at least 95% identity, and even most preferably at least 97% identity with an amino acid sequence selected from the group consisting of SEQ ID NOs: 4877-9751 and fragments thereof retaining biological activity.

[0085] In a preferred aspect, the biological substance comprises an amino acid sequence an amino acid sequence having a degree of sequence identity of preferably at least 60% identity, more preferably at least 65% identity, more preferably at least 70% identity, more preferably at least 75% identity, more preferably at least 80%, more preferably at least 85%, even more preferably at least 90%, most preferably at least 95%, and even most preferably at least 97% with an amino acid sequence selected from the group consisting of SEQ ID NOs: 4944, 4985, 5051, 5058, 5064, 5076, 5079, 5097, 5098, 5099, 5106, 5115, 5117, 5136, 5137, 5197, 5204, 5286, 5459, 5529, 5604, 5723, 5724, 5725, 5726, 5761, 5923, 6056, 6097, 6153, 6192, 6371, 6372, 6376, 6456, 6504, 6531, 6545, 6546, 6547, 6548, 6550, 6945, 6965, 7053, 7116, 7163, 7164, 7165, 7166, 7169, 7170, 7174, 7176, 7177, 7363, 7392, 7397, 7399, 7402, 7420, 7421, 7423, 7425, 7438, 7449, 7453, 7468, 7507, 7562, 7563, 7565, 7573, 7641, 7815, 8003, 8008, 8009, 8010, 8011, 8014, 8015, 8018, 8020, 8021, 8022, 8046, 8099, 8100, 8103, 8140, 8323, 8710, 8711, 8966, 9034, 9035, 9036, 9049, 9051, 9054, 9056, 9057, 9224, 9516, 9525, 9547, 9562, 9564, 4900, 4925, 4930, 4952, 4957, 4966, 4973, 4978, 5000, 5010, 5044, 5046, 5047, 5049, 5052, 5053, 5054, 5055, 5056, 5057, 5060, 5061, 5062, 5067, 5069, 5070, 5071, 5073, 5074, 5078, 5080, 5081, 5082, 5083, 5084, 5085, 5086, 5087, 5088, 5089, 5090, 5091, 5092, 5093, 5094, 5095, 5096, 5100, 5101, 5102, 5103, 5104, 5105, 5112, 5116, 5118, 5119, 5120, 5121, 5122, 5123, 5124, 5125, 5126, 5127, 5128, 5129, 5130, 5131, 5132, 5133, 5134, 5135, 5138, 5139, 5140, 5141, 5151, 5162, 5173, 5180, 5181, 5183, 5192, 5198, 5225, 5229, 5235, 5236, 5238, 5242, 5249, 5256, 5290, 5297, 5307, 5320, 5344, 5347, 5353, 5354, 5362, 5363, 5366, 5373, 5391, 5396, 5398, 5399, 5412, 5416, 5428, 5445, 5450, 5456, 5467, 5482, 5493, 5496, 5502, 5503, 5506, 5541, 5547, 5563, 5566, 5574, 5577, 5585, 5594, 5601, 5609, 5623, 5626, 5639, 5648, 5649, 5652, 5664, 5666, 5702, 5704, 5706, 5708, 5717, 5722, 5730, 5732, 5760, 5762, 5776, 5784, 5819, 5832, 5852, 5857, 5866, 5869, 5890, 5893, 5897, 5907, 5909, 5912, 5933, 5953, 5955, 5963, 5966, 5973, 5983, 5986, 5987, 5993, 6003, 6005, 6023, 6026, 6028, 6029, 6033, 6035, 6039, 6045, 6050, 6051, 6052, 6055, 6058, 6059, 6068, 6069, 6074, 6083, 6090, 6095, 6112, 6119, 6137, 6138, 6140, 6141, 6167, 6177, 6188, 6189, 6190, 6191, 6193, 6195, 6209, 6220, 6230, 6245, 6248, 6249, 6276, 6286, 6294, 6296, 6299, 6307, 6308, 6315, 6317, 6323, 6330, 6341, 6345, 6384, 6402, 6414, 6431, 6440, 6445, 6464, 6494, 6506, 6509, 6510, 6511, 6513, 6514, 6515, 6516, 6517, 6518, 6519, 6520, 6521, 6522, 6524, 6525, 6526, 6527, 6528, 6529, 6530, 6532, 6533, 6534, 6535, 6536, 6537, 6538, 6539, 6540, 6541, 6542, 6543, 6544, 6552, 6557, 6559, 6563, 6567, 6569, 6572, 6578, 6579, 6603, 6607, 6609, 6611, 6626, 6650, 6654, 6658, 6661, 6667, 6670, 6673, 6691, 6706, 6711, 6713, 6726, 6728, 6741, 6758, 6762, 6819, 6821, 6877, 6882, 6897, 6913, 6919, 6923, 6940, 6942, 6947, 6951, 6958, 6969, 6981, 6984, 6994, 6995, 6996, 6999, 7006, 7014, 7022, 7023, 7041, 7046, 7069, 7071, 7073, 7079, 7080, 7086, 7088, 7091, 7096, 7100, 7105, 7111, 7115, 7129, 7130, 7133, 7138, 7148, 7152, 7157, 7161, 7167, 7171, 7172, 7173, 7175, 7178, 7179, 7180, 7199, 7200, 7202, 7211, 7212, 7216, 7222, 7226, 7229, 7237, 7239, 7256, 7263, 7275, 7278, 7279, 7283, 7285, 7286, 7287, 7289, 7290, 7299, 7300, 7305, 7310, 7314, 7321, 7324, 7332, 7339, 7342, 7343, 7344, 7351, 7358, 7366, 7373, 7375, 7379, 7380, 7381, 7382, 7383, 7384, 7385, 7386, 7387, 7388, 7389, 7390, 7391, 7393, 7394, 7395, 7396, 7400, 7401, 7403, 7404, 7405, 7406, 7407, 7408, 7409, 7410, 7411, 7412, 7413, 7414, 7415, 7416, 7417, 7418, 7419, 7422, 7424, 7426, 7427, 7428, 7429, 7430, 7431, 7432, 7433, 7434, 7435, 7436, 7437, 7439, 7440, 7442, 7443, 7444, 7445, 7446, 7447, 7448, 7450, 7451, 7452, 7454, 7455, 7456, 7457, 7458, 7459, 7460, 7461, 7462, 7463, 7464, 7465, 7466, 7467, 7469, 7470, 7471, 7472, 7473, 7474, 7475, 7476, 7477, 7478, 7479, 7480, 7481, 7482, 7483, 7484, 7485, 7486, 7487, 7488, 7489, 7490, 7491, 7492, 7493, 7494, 7495, 7496, 7497, 7498, 7499, 7500, 7501, 7502, 7503, 7504, 7505, 7506, 7508, 7509, 7510, 7511, 7513, 7514, 7515, 7516, 7517, 7518, 7519, 7520, 7521, 7522, 7523, 7524, 7525, 7526, 7527, 7528, 7529, 7530, 7531, 7532, 7533, 7534, 7536, 7539, 7540, 7542, 7544, 7545, 7546, 7547, 7548, 7549, 7550, 7551, 7552, 7553, 7554, 7555, 7556, 7559, 7560, 7561, 7564, 7566, 7567, 7568, 7571, 7572, 7581, 7583, 7592, 7595, 7598, 7605, 7608, 7626, 7637, 7646, 7670, 7681, 7688, 7709, 7710, 7716, 7725, 7741, 7742, 7749, 7753, 7758, 7766, 7773, 7777, 7779, 7792, 7822, 7832, 7835, 7844, 7847, 7848, 7874, 7879, 7893, 7894, 7903, 7921, 7929, 7939, 7944, 7957, 7962, 7968, 7987, 7998, 8012, 8016, 8017, 8019, 8023, 8024, 8025, 8037, 8090, 8097, 8101, 8102, 8104, 8106, 8119, 8123, 8134, 8136, 8139, 8162, 8166, 8174, 8178, 8185, 8186, 8196, 8198, 8199, 8208, 8230, 8237, 8246, 8299, 8304, 8306, 8309, 8317, 8321, 8332, 8333, 8346, 8361, 8368, 8371, 8374, 8378, 8379, 8383, 8384, 8394, 8424, 8433, 8452, 8462, 8468, 8473, 8476, 8478, 8481, 8486, 8517, 8528, 8530, 8545, 8548, 8557, 8565, 8569, 8582, 8584, 8591, 8602, 8610, 8611, 8612, 8619, 8628, 8640, 8645, 8655, 8665, 8667, 8673, 8674, 8693, 8700, 8714, 8747, 8754, 8756, 8760, 8779, 8786, 8790, 8791, 8797, 8801, 8806, 8813, 8844, 8886, 8892, 8893, 8908, 8912, 8923, 8930, 8931, 8934, 8943, 8951, 8952, 8953, 8956, 8957, 8960, 8961, 8965, 8981, 8987, 8992, 9019, 9020, 9033, 9037, 9038, 9039, 9040, 9041, 9042, 9043, 9044, 9045, 9046, 9047, 9048, 9050, 9076, 9096, 9110, 9114, 9118, 9160, 9163, 9180, 9198, 9208, 9211, 9228, 9245, 9273, 9284, 9292, 9296, 9298, 9304, 9310, 9321, 9323, 9325, 9337, 9344, 9347, 9349, 9351, 9357, 9362, 9363, 9374, 9384, 9385, 9388, 9393, 9419, 9433, 9434, 9435, 9436, 9444, 9446, 9453, 9475, 9480, 9482, 9497, 9506, 9508, 9518, 9520, 9522, 9523, 9524, 9533, 9544, 9557, 9568, 9579, 9583, 9593, 9597, 9629, 9642, 9661, 9667, 9672, 9679, 9687, 9689, 9698, 9705, 9708, 9713, 9723, 9724, 9729, 9734, 9737, and 9747; preferably at least 65% identity, more preferably at least 70% identity, more preferably at least 75% identity, more preferably at least 80%, more preferably at least 85%, even more preferably at least 90%, most preferably at least 95%, and even most preferably at least 97% with an amino acid sequence selected from the group consisting of SEQ ID NOs: 4991, 5068, 5308, 5463, 5919, 6549, 6648, 6680, 6948, 7298, 7541, 7896, 7911, 8497, 8702, 8729, 8737, 9052, 9690, and 9709; preferably at least 70% identity, more preferably at least 75% identity, more preferably at least 80%, more preferably at least 85%, even more preferably at least 90%, most preferably at least 95%, and even most preferably at least 97% with an amino acid sequence selected from the group consisting of SEQ ID NOs: 4986, 5041, 5043, 5418, 5427, 5500, 5515, 5696, 5713, 5785, 5939, 6106, 6109, 6171, 6260, 6503, 6677, 6724, 7054, 7260, 7295, 7316, 7341, 7512, 7538, 7591, 7628, 7735, 7912, 8050, 8076, 8206, 8207, 8240, 8327, 8406, 8428, 8860, 8955, 9061, 9099, 9115, 9262, 9591, 9641, and 9720; preferably at least 75% identity, more preferably at least 80%, more preferably at least 85%, even more preferably at least 90%, most preferably at least 95%, and even most preferably at least 97% with an amino acid sequence selected from the group consisting of SEQ ID NOs: 5038, 5059, 5240, 5403, 5444, 5508, 5559, 5562, 5642, 5651, 5846, 5885, 5921, 5942, 6015, 6067, 6071, 6164, 6215, 6293, 6373, 6390, 6446, 6624, 6704, 6717, 6749, 6759, 6808, 6847, 6848, 6852, 6854, 7292, 7297, 7308, 7317, 7537, 7543, 7557, 7603, 7651, 7858, 7949, 7954, 7996, 8074, 8200, 8221, 8263, 8288, 8614, 8684, 8720, 8728, 8740, 8749, 8787, 8864, 8958, 9055, 9176, 9196, 9283, 9308, 9352, 9491, 9512, 9602, 9653, 9684, 9719, and 9731; preferably at least 80% identity, more preferably at least 85% identity, even more preferably at least 90% identity, most preferably at least 95% identity, and even most preferably at least 97% identity with an amino acid sequence selected from the group consisting of SEQ ID NOs: 4891, 4956, 5042, 5072, 5169, 5190, 5195, 5217, 5241, 5266, 5305, 5369, 5374, 5377, 5409, 5435, 5512, 5524, 5538, 5595, 5613, 5647, 5657, 5665, 5667, 5735, 5743, 5830, 5878, 5900, 5903, 5977, 5988, 6000, 6060, 6066, 6070, 6073, 6075, 6105, 6120, 6139, 6152, 6174, 6291, 6335, 6375, 6437, 6466, 6492, 6505, 6507, 6523, 6553, 6592, 6651, 6694, 6730, 6732, 6774, 6843, 6929, 6943, 6964, 7093, 7132, 7144, 7224, 7349, 7374, 7398, 7570, 7578, 7632, 7635, 7643, 7680, 7682, 7685, 7700, 7713, 7727, 7800, 7843, 7864, 7918, 7947, 7982, 7989, 7991, 7999, 8055, 8057, 8085, 8095, 8170, 8182, 8191, 8210, 8255, 8261, 8328, 8365, 8399, 8410, 8479, 8551, 8561, 8577, 8589, 8649, 8679, 8742, 8744, 8784, 8789, 8796, 8818, 8832, 8835, 8845, 8854, 8858, 8868, 8878, 8900, 8950, 9007, 9102, 9108, 9151, 9169, 9207, 9241, 9246, 9248, 9250, 9299, 9341, 9343, 9412, 9443, 9470, 9476, 9511, 9528, 9559, 9565, 9577, 9584, 9594, 9595, 9682, and 9714; preferably at least 85% identity, more preferably at least 90% identity, most preferably at least 95% identity, and even most preferably at least 97% identity with an amino acid sequence selected from the group consisting of SEQ ID NOs: 4913, 4948, 4968, 5025, 5034, 5066, 5109, 5110, 5146, 5160, 5199, 5200, 5203, 5211, 5221, 5223, 5226, 5252, 5269, 5273, 5293, 5309, 5318, 5342, 5352, 5393, 5394, 5421, 5430, 5431, 5434, 5447, 5458, 5492, 5507, 5511, 5514, 5525, 5526, 5530, 5544, 5570, 5616, 5617, 5621, 5640, 5661, 5663, 5691, 5716, 5738, 5751, 5753, 5757, 5759, 5786, 5802, 5820, 5826, 5855, 5858, 5871, 5872, 5902, 5905, 5908, 5915, 5936, 5937, 5938, 5947, 6006, 6011, 6012, 6025, 6030, 6032, 6034, 6057, 6080, 6084, 6093, 6096, 6110, 6131, 6178, 6183, 6199, 6232, 6236, 6243, 6257, 6258, 6313, 6331, 6354, 6360, 6362, 6386, 6417, 6421, 6435, 6455, 6468, 6472, 6475, 6476, 6478, 6495, 6555, 6566, 6568, 6604, 6608, 6641, 6662, 6663, 6665, 6692, 6699, 6736, 6752, 6763, 6807, 6809, 6810, 6840, 6842, 6844, 6853, 6855, 6857, 6866, 6906, 6908, 6915, 6922, 6953, 6962, 6977, 6989, 7004, 7025, 7032, 7042, 7045, 7058, 7072, 7085, 7134, 7139, 7145, 7182, 7188, 7194, 7208, 7227, 7249, 7261, 7272, 7293, 7309, 7320, 7331, 7333, 7334, 7354, 7367, 7371, 7558, 7597, 7602, 7623, 7664, 7677, 7679, 7687, 7732, 7734, 7739, 7744, 7752, 7765, 7769, 7790, 7801, 7818, 7823, 7833, 7837, 7860, 7867, 7877, 7882, 7915, 7931, 7932, 7946, 7948, 7959, 7967, 7973, 7975, 7977, 7978, 7986, 8071, 8072, 8096, 8107, 8129, 8146, 8148, 8153, 8164, 8165, 8169, 8203, 8211, 8216, 8218, 8234, 8245, 8253, 8275, 8297, 8315, 8334, 8340, 8357, 8362, 8372, 8386, 8398, 8425, 8438, 8455, 8460, 8470, 8480, 8490, 8506, 8531, 8533, 8572, 8593, 8600, 8615, 8623, 8627, 8630, 8634, 8664, 8687, 8703, 8704, 8705, 8726, 8739, 8750, 8752, 8753, 8769, 8780, 8781, 8805, 8816, 8825, 8846, 8869, 8870, 8883, 8913, 8938, 8944, 8945, 8948, 8959, 8962, 8973, 8976, 8980, 8991, 9000, 9006, 9017, 9068, 9093, 9097, 9103, 9109, 9146, 9155, 9159, 9255, 9258, 9260, 9266, 9269, 9271, 9278, 9293, 9350, 9373, 9394, 9415, 9420, 9449, 9466, 9472, 9477, 9486, 9500, 9504, 9514, 9517, 9535, 9573, 9590, 9599, 9601, 9623, 9645, 9648, 9652, 9654, 9659, 9726, 9728, 9736, and 9748; preferably at least 90% identity, more preferably at least 95% identity, and most preferably at least 97% identity with an amino acid sequence selected from the group consisting of SEQ ID NOs: 4890, 4895, 4921, 4923, 4927, 4933, 4934, 4937, 4939, 4943, 4946, 4950, 4951, 4955, 4958, 4967, 4970, 4981, 4982, 4987, 4989, 4999, 5017, 5022, 5029, 5048, 5111, 5113, 5145, 5152, 5157, 5165, 5171, 5178, 5179, 5182, 5186, 5202, 5213, 5214, 5215, 5218, 5227, 5230, 5233, 5245, 5268, 5272, 5274, 5279, 5281, 5283, 5298, 5303, 5315, 5324, 5326, 5328, 5329, 5330, 5336, 5337, 5338, 5339, 5346, 5357, 5360, 5376, 5380, 5387, 5400, 5401, 5414, 5417, 5419, 5422, 5424, 5436, 5442, 5446, 5448, 5455, 5457, 5466, 5475, 5499, 5501, 5510, 5537, 5539, 5542, 5550, 5552, 5557, 5565, 5571, 5573, 5586, 5589, 5612, 5615, 5620, 5622, 5628, 5632, 5634, 5638, 5645, 5646, 5660, 5670, 5677, 5678, 5681, 5688, 5705, 5707, 5710, 5739, 5748, 5754, 5756, 5763, 5764, 5765, 5766, 5768, 5779, 5782, 5783, 5787, 5791, 5792, 5793, 5799, 5808, 5813, 5821, 5827, 5828, 5834, 5835, 5837, 5842, 5850, 5856, 5859, 5864, 5870, 5884, 5906, 5914, 5917, 5945, 5946, 5958, 5964, 5965, 5985, 5989, 5994, 5998, 6007, 6009, 6016, 6017, 6019, 6022, 6031, 6048, 6062, 6064, 6079, 6081, 6086, 6089, 6098, 6103, 6107, 6113, 6121, 6122, 6125, 6156, 6163, 6165, 6181, 6205, 6212, 6223, 6235, 6238, 6239, 6242, 6244, 6250, 6251, 6255, 6261, 6262, 6265, 6267, 6269, 6281, 6283, 6284, 6290, 6292, 6300, 6301, 6318, 6324, 6327, 6332, 6333, 6338, 6339, 6344, 6349, 6353, 6361, 6363, 6374, 6377, 6383, 6387, 6396, 6397, 6399, 6400, 6413, 6423, 6449, 6450, 6462, 6465, 6467, 6471, 6484, 6493, 6501, 6512, 6565, 6573, 6574, 6575, 6576, 6580, 6583, 6585, 6589, 6594, 6598, 6600, 6605, 6619, 6629, 6635, 6636, 6637, 6638, 6642, 6647, 6664, 6669, 6686, 6688, 6695, 6696, 6697, 6698, 6700, 6710, 6712, 6729, 6735, 6740, 6742, 6743, 6744, 6745, 6768, 6779, 6780, 6781, 6782, 6786, 6792, 6793, 6795, 6800, 6801, 6802, 6804, 6823, 6827, 6829, 6833, 6834, 6836, 6838, 6861, 6862, 6863, 6867, 6868, 6871, 6872, 6887, 6903, 6918, 6920, 6927, 6933, 6939, 6944, 6949, 6960, 6966, 6973, 6976, 6979, 7000, 7002, 7015, 7017, 7019, 7036, 7040, 7051, 7055, 7056, 7063, 7075, 7077, 7087, 7090, 7092, 7097, 7102, 7103, 7104, 7109, 7112, 7117, 7118, 7122, 7123, 7125, 7126, 7127, 7158, 7162, 7181, 7186, 7196, 7201, 7203, 7206, 7209, 7210, 7219, 7221, 7230, 7231, 7232, 7233, 7235, 7236, 7244, 7248, 7251, 7252, 7257, 7268, 7271, 7274, 7281, 7304, 7326, 7335, 7352, 7356, 7357, 7360, 7364, 7577, 7579, 7601, 7607, 7615, 7624, 7625, 7639, 7650, 7658, 7672, 7696, 7712, 7718, 7728, 7729, 7730, 7745, 7747, 7748, 7751, 7754, 7756, 7774, 7780, 7786, 7808, 7810, 7826, 7831, 7840, 7849, 7854, 7871, 7872, 7886, 7892, 7914, 7925, 7928, 7933, 7934, 7937, 7941, 7945, 7969, 7970, 7980, 8032, 8039, 8040, 8060, 8063, 8065, 8066, 8075, 8077, 8078, 8086, 8122, 8133, 8138, 8149, 8157, 8158, 8159, 8177, 8180, 8184, 8188, 8195, 8205, 8209, 8220, 8223, 8235, 8241, 8243, 8247, 8250, 8252, 8257, 8271, 8280, 8282, 8283, 8295, 8298, 8305, 8310, 8325, 8342, 8344, 8347, 8358, 8363, 8366, 8373, 8377, 8382, 8387, 8392, 8400, 8404, 8405, 8407, 8413, 8417, 8419, 8421, 8426, 8429, 8434, 8436, 8442, 8450, 8457, 8458, 8461, 8463, 8469, 8491, 8494, 8501, 8504, 8507, 8508, 8516, 8523, 8532, 8536, 8544, 8550, 8552, 8554, 8564, 8566, 8587, 8603, 8622, 8629, 8632, 8635, 8636, 8646, 8647, 8652, 8653, 8654, 8657, 8682, 8690, 8698, 8701, 8709, 8712, 8724, 8725, 8736, 8755, 8767, 8772, 8776, 8798, 8803, 8804, 8817, 8836, 8843, 8852, 8857, 8859, 8861, 8866, 8880, 8881, 8882, 8884, 8885, 8891, 8894, 8901, 8904, 8905, 8910, 8911, 8927, 8933, 8954, 8963, 8971, 8975, 8977, 8984, 8995, 8997, 9004, 9008, 9023, 9026, 9031, 9063, 9078, 9080, 9083, 9091, 9092, 9112, 9120, 9127, 9134, 9140, 9149, 9156, 9164, 9168, 9185, 9189, 9190, 9193, 9197, 9202, 9204, 9214, 9217, 9220, 9232, 9233, 9236, 9243, 9259, 9274, 9275, 9280, 9286, 9291, 9300, 9305, 9306, 9317, 9329, 9356, 9364, 9366, 9367, 9378, 9382, 9389, 9390, 9392, 9396, 9399, 9405, 9417, 9422, 9425, 9428, 9438, 9441, 9451, 9454, 9462, 9463, 9468, 9473, 9496, 9499, 9501, 9502, 9510, 9539, 9540, 9550, 9556, 9561, 9570, 9574, 9585, 9587, 9604, 9605, 9606, 9613, 9616, 9618, 9630, 9632, 9633, 9635, 9650, 9651, 9655, 9656, 9670, 9680, 9683, 9686, 9699, 9704, 9716, 9727, and 9749; or preferably at least 95% identity and more preferably at least 97% identity with an amino acid sequence selected from the group consisting of SEQ ID NOs: 4877, 4878, 4879, 4880, 4881, 4882, 4883, 4884, 4885, 4886, 4887, 4888, 4889, 4892, 4893, 4894, 4896, 4897, 4898, 4899, 4901, 4902, 4903, 4904, 4905, 4906, 4907, 4908, 4909, 4910, 4911, 4912, 4914, 4915, 4916, 4917, 4918, 4919, 4920, 4922, 4924, 4926, 4928, 4929, 4931, 4932, 4935, 4936, 4938, 4940, 4941, 4942, 4945, 4947, 4949, 4953, 4954, 4959, 4960, 4961, 4962, 4963, 4964, 4965, 4969, 4971, 4972, 4974, 4975, 4976, 4977, 4979, 4980, 4983, 4984, 4988, 4990, 4992, 4993, 4994, 4995, 4996, 4997, 4998, 5001, 5002, 5003, 5004, 5005, 5006, 5007, 5008, 5009, 5011, 5012, 5013, 5014, 5015, 5016, 5018, 5019, 5020, 5021, 5023, 5024, 5026, 5027, 5028, 5030, 5031, 5032, 5033, 5035, 5036, 5037, 5039, 5045, 5050, 5063, 5065, 5075, 5077, 5107, 5108, 5114, 5142, 5143, 5144, 5147, 5148, 5149, 5150, 5153, 5154, 5155, 5156, 5158, 5159, 5161, 5163, 5164, 5166, 5167, 5168, 5170, 5172, 5174, 5175, 5176, 5177, 5184, 5185, 5187, 5188, 5189, 5191, 5193, 5194, 5196, 5201, 5205, 5206, 5207, 5208, 5209, 5210, 5212, 5216, 5219, 5220, 5222, 5224, 5228, 5231, 5232, 5234, 5237, 5239, 5243, 5244, 5246, 5247, 5248, 5250, 5251, 5254, 5255, 5257, 5258, 5259, 5260, 5261, 5262, 5263, 5264, 5265, 5267, 5270, 5271, 5275, 5276, 5277, 5278, 5280, 5282, 5284, 5285, 5287, 5288, 5289, 5291, 5292, 5294, 5295, 5296, 5299, 5300, 5301, 5302, 5304, 5306, 5310, 5311, 5312, 5313, 5314, 5316, 5317, 5319, 5321, 5322, 5323, 5325, 5327, 5331, 5332, 5333, 5334, 5335, 5340, 5341, 5343, 5345, 5348, 5349, 5350, 5351, 5355, 5356, 5358, 5359, 5361, 5364, 5365, 5367, 5368, 5370, 5371, 5372, 5375, 5379, 5381, 5382, 5383, 5384, 5385, 5386, 5388, 5389, 5390, 5392, 5395, 5397, 5402, 5404, 5405, 5406, 5407, 5408, 5410, 5411, 5413, 5415, 5420, 5423, 5425, 5426, 5429, 5432, 5433, 5437, 5438, 5439, 5440, 5441, 5443, 5449, 5451, 5452, 5453, 5454, 5460, 5461, 5462, 5464, 5465, 5468, 5469, 5470, 5471, 5472, 5473, 5474, 5476, 5477, 5478, 5479, 5480, 5481, 5483, 5484, 5485, 5486, 5487, 5488, 5489, 5490, 5491, 5494, 5495, 5497, 5498, 5504, 5505, 5509, 5513, 5516, 5517, 5518, 5519, 5520, 5521, 5522, 5523, 5527, 5528, 5531, 5532, 5533, 5534, 5535, 5536, 5540, 5543, 5545, 5546, 5548, 5549, 5551, 5553, 5554, 5555, 5556, 5558, 5560, 5561, 5564, 5568, 5569, 5572, 5575, 5576, 5578, 5579, 5580, 5581, 5582, 5583, 5584, 5587, 5588, 5590, 5591, 5592, 5593, 5596, 5597, 5598, 5599, 5600, 5602, 5603, 5605, 5606, 5607, 5608, 5610, 5611, 5614, 5618, 5619, 5624, 5625, 5627, 5629, 5630, 5631, 5633, 5635, 5636, 5637, 5641, 5643, 5644, 5650, 5653, 5654, 5655, 5656, 5658, 5659, 5662, 5668, 5669, 5671, 5672, 5673, 5674, 5675, 5676, 5679, 5680, 5682, 5683, 5684, 5685, 5686, 5687, 5689, 5690, 5692, 5693, 5694, 5695, 5697, 5698, 5699, 5700, 5701, 5703, 5709, 5711, 5712, 5714, 5715, 5718, 5719, 5720, 5721, 5728, 5729, 5731, 5733, 5734, 5736, 5737, 5740, 5741, 5742, 5744, 5745, 5746, 5747, 5749, 5750, 5752, 5755, 5758, 5767, 5769, 5770, 5771, 5772, 5773, 5774, 5775, 5777, 5778, 5780, 5781, 5788, 5789, 5790, 5794, 5795, 5796, 5797, 5798, 5800, 5801, 5803, 5804, 5805, 5806, 5807, 5809, 5810, 5811, 5812, 5814, 5815, 5816, 5817, 5818, 5822, 5823, 5824, 5825, 5829, 5831, 5833, 5836, 5838, 5839, 5840, 5841, 5843, 5844, 5845, 5847, 5848, 5849, 5851, 5853, 5854, 5860, 5861, 5862, 5863, 5865, 5867, 5868, 5873, 5874, 5875, 5876, 5877, 5879, 5880, 5881, 5882, 5883, 5886, 5887, 5888, 5889, 5891, 5892, 5894, 5895, 5896, 5899, 5901, 5904, 5910, 5911, 5913, 5916, 5918, 5920, 5922, 5924, 5925, 5926, 5927, 5928, 5929, 5930, 5931, 5932, 5934, 5935, 5940, 5941, 5943, 5944, 5948, 5949, 5950, 5951, 5952, 5954, 5956, 5957, 5959, 5960, 5961, 5962, 5967, 5968, 5969, 5970, 5971, 5972, 5974, 5975, 5976, 5978, 5979, 5980, 5981, 5982, 5984, 5990, 5991, 5992, 5995, 5996, 5997, 5999, 6001, 6002, 6004, 6008, 6010, 6013, 6014, 6018, 6020, 6021, 6024, 6027, 6036, 6037, 6038, 6040, 6041, 6042, 6043, 6044, 6046, 6047, 6049, 6053, 6054, 6061, 6063, 6065, 6072, 6076, 6077, 6078, 6082, 6085, 6087, 6088, 6091, 6092, 6094, 6099, 6100, 6101, 6102, 6104, 6108, 6111, 6114, 6115, 6116, 6117, 6118, 6123, 6124, 6126, 6127, 6128, 6129, 6130, 6132, 6133, 6134, 6135, 6136, 6142, 6143, 6144, 6145, 6146, 6147, 6148, 6149, 6150, 6151, 6154, 6155, 6157, 6158, 6159, 6160, 6161, 6162, 6166, 6168, 6169, 6170, 6172, 6173, 6175, 6176, 6179, 6180, 6182, 6184, 6185, 6186, 6187, 6194, 6196, 6197, 6198, 6200, 6201, 6202, 6203, 6204, 6206, 6207, 6208, 6210, 6211, 6213, 6214, 6216, 6217, 6218, 6219, 6221, 6222, 6224, 6225, 6226, 6227, 6228, 6229, 6231, 6233, 6234, 6237, 6240, 6246, 6247, 6252, 6253, 6254, 6256, 6259, 6263, 6264, 6266, 6268, 6270, 6271, 6272, 6273, 6274, 6275, 6277, 6278, 6279, 6280, 6282, 6285, 6287, 6288, 6289, 6295, 6297, 6298, 6302, 6303, 6304, 6305, 6306, 6309, 6310, 6311, 6312, 6314, 6316, 6319, 6320, 6321, 6322, 6325, 6326, 6328, 6329, 6336, 6337, 6340, 6342, 6343, 6346, 6347, 6348, 6350, 6351, 6352, 6355, 6356, 6357, 6358, 6359, 6364, 6365, 6366, 6367, 6368, 6369, 6378, 6379, 6380, 6381, 6382, 6385, 6388, 6389, 6391, 6392, 6393, 6394, 6395, 6398, 6401, 6403, 6404, 6405, 6406, 6407, 6408, 6409, 6410, 6411, 6412, 6415, 6416, 6418, 6419, 6420, 6422, 6424, 6425, 6426, 6427, 6428, 6429, 6430, 6432, 6433, 6434, 6436, 6438, 6439, 6441, 6442, 6443, 6444, 6447, 6448, 6451, 6452, 6453, 6454, 6457, 6458, 6459, 6460, 6461, 6463, 6469, 6470, 6473, 6474, 6477, 6479, 6480, 6481, 6482, 6483, 6485, 6486, 6487, 6488, 6489, 6490, 6491, 6496, 6497, 6498, 6499, 6500, 6502, 6508, 6556, 6558, 6560, 6561, 6562, 6564, 6570, 6571, 6577, 6581, 6582, 6584, 6586, 6587, 6588, 6590, 6591, 6593, 6595, 6596, 6597, 6599, 6601, 6602, 6606, 6610, 6612, 6613, 6614, 6615, 6616, 6617, 6618, 6620, 6621, 6622, 6623, 6625, 6627, 6628, 6630, 6631, 6632, 6633, 6634, 6639, 6640, 6643, 6644, 6645, 6646, 6649, 6652, 6653, 6655, 6656, 6657, 6659, 6660, 6666, 6668, 6671, 6672, 6674, 6675, 6676, 6678, 6679, 6681, 6682, 6683, 6684, 6685, 6687, 6689, 6690, 6693, 6701, 6702, 6703, 6705, 6707, 6708, 6709, 6714, 6715, 6716, 6718, 6719, 6720, 6721, 6722, 6723, 6725, 6727, 6731, 6733, 6734, 6737, 6738, 6739, 6746, 6747, 6748, 6750, 6751, 6753, 6754, 6755, 6756, 6757, 6760, 6761, 6764, 6765, 6766, 6767, 6769, 6770, 6771, 6772, 6773, 6775, 6776, 6777, 6778, 6783, 6784, 6785, 6787, 6788, 6789, 6790, 6791, 6794, 6796, 6797, 6798, 6799, 6803, 6805, 6806, 6811, 6812, 6813, 6814, 6815, 6816, 6817, 6818, 6820, 6822, 6824, 6825, 6826, 6828, 6830, 6831, 6832, 6835, 6837, 6839, 6841, 6845, 6846, 6849, 6850, 6851, 6856, 6858, 6859, 6860, 6864, 6865, 6869, 6870, 6873, 6874, 6875, 6876, 6878, 6879, 6880, 6881, 6883, 6884, 6885, 6886, 6888, 6889, 6890, 6891, 6892, 6893, 6894, 6895, 6896, 6898, 6899, 6900, 6901, 6902, 6904, 6905, 6907, 6909, 6910, 6911, 6912, 6914, 6916, 6917, 6921, 6924, 6925, 6926, 6928, 6930, 6931, 6932, 6934, 6935, 6936, 6937, 6938, 6941, 6950, 6952, 6954, 6955, 6956, 6957, 6959, 6961, 6967, 6968, 6970, 6971, 6972, 6974, 6975, 6978, 6980, 6982, 6983, 6985, 6986, 6987, 6988, 6990, 6991, 6992, 6993, 6997, 6998, 7001, 7003, 7005, 7007, 7008, 7009, 7010, 7011, 7012, 7013, 7016, 7018, 7020, 7021, 7024, 7026, 7027, 7028, 7029, 7030, 7031, 7033, 7034, 7035, 7037, 7038, 7039, 7043, 7044, 7047, 7048, 7049, 7050, 7052, 7057, 7059, 7060, 7061, 7062, 7064, 7065, 7066, 7067, 7068, 7070, 7074, 7076, 7078, 7081, 7082, 7083, 7084, 7089, 7094, 7095, 7098, 7099, 7101, 7106, 7107, 7108, 7110, 7113, 7114, 7119, 7120, 7121, 7124, 7128, 7131, 7135, 7136, 7137, 7140, 7141, 7142, 7143, 7146, 7147, 7149, 7150, 7151, 7153, 7154, 7155, 7156, 7159, 7160, 7183, 7184, 7185, 7187, 7189, 7190, 7191, 7192, 7193, 7197, 7198, 7204, 7205, 7207, 7213, 7214, 7215, 7217, 7218, 7220, 7223, 7225, 7228, 7234, 7238, 7240, 7241, 7242, 7243, 7245, 7246, 7247, 7250, 7253, 7254, 7255, 7258, 7259, 7262, 7264, 7265, 7266, 7267, 7269, 7270, 7273, 7276, 7277, 7280, 7282, 7284, 7288, 7291, 7294, 7296, 7301, 7302, 7303, 7306, 7307, 7311, 7312, 7313, 7315, 7318, 7319, 7322, 7323, 7325, 7327, 7328, 7329, 7330, 7336, 7337, 7338, 7340, 7345, 7346, 7347, 7348, 7350, 7355, 7359, 7361, 7362, 7365, 7368, 7369, 7370, 7372, 7376, 7377, 7378, 7574, 7575, 7576, 7580, 7582, 7584, 7585, 7586, 7587, 7588, 7589, 7590, 7593, 7594, 7596, 7599, 7600, 7604, 7606, 7609, 7610, 7611, 7612, 7613, 7614, 7616, 7617, 7618, 7619, 7620, 7621, 7622, 7627, 7629, 7630, 7631, 7633, 7634, 7636, 7638, 7640, 7642, 7644, 7645, 7647, 7648, 7649, 7652, 7653, 7654, 7655, 7656, 7657, 7659, 7660, 7661, 7662, 7663, 7665, 7666, 7667, 7668, 7669, 7671, 7673, 7674, 7675, 7676, 7678, 7683, 7684, 7686, 7689, 7690, 7691, 7692, 7693, 7694, 7695, 7697, 7698, 7699, 7701, 7702, 7703, 7704, 7705, 7706, 7707, 7708, 7711, 7714, 7715, 7717, 7719, 7720, 7721, 7722, 7723, 7724, 7726, 7731, 7733, 7736, 7737, 7738, 7740, 7743, 7746, 7750, 7755, 7757, 7759, 7760, 7761, 7762, 7763, 7764, 7767, 7768, 7770, 7771, 7772, 7775, 7776, 7778, 7781, 7782, 7783, 7784, 7785, 7787, 7788, 7789, 7791, 7793, 7794, 7795, 7796, 7797, 7798, 7799, 7802, 7803, 7804, 7805, 7806, 7807, 7809, 7811, 7812, 7813, 7814, 7816, 7817, 7819, 7820, 7821, 7824, 7825, 7827, 7828, 7829, 7830, 7834, 7836, 7838, 7839, 7841, 7842, 7845, 7846, 7850, 7851, 7852, 7853, 7855, 7856, 7857, 7859, 7861, 7862, 7863, 7865, 7866, 7868, 7869, 7870, 7873, 7875, 7876, 7878, 7880, 7881, 7883, 7884, 7885, 7887, 7888, 7889, 7891, 7895, 7897, 7898, 7899, 7900, 7901, 7902, 7904, 7905, 7906, 7907, 7908, 7909, 7910, 7913, 7916, 7917, 7919, 7920, 7922, 7923, 7924, 7926, 7927, 7930, 7935, 7936, 7938, 7940, 7942, 7943, 7950, 7951, 7952, 7953, 7955, 7956, 7958, 7960, 7961, 7963, 7964, 7965, 7966, 7971, 7972, 7974, 7976, 7979, 7981, 7983, 7984, 7985, 7988, 7990, 7992, 7993, 7994, 7995, 7997, 8000, 8001, 8002, 8004, 8005, 8006, 8007, 8026, 8027, 8028, 8029, 8030, 8031, 8033, 8034, 8035, 8036, 8038, 8041, 8042, 8043, 8044, 8045, 8047, 8048, 8049, 8051, 8052, 8053, 8054, 8056, 8058, 8059, 8061, 8062, 8064, 8067, 8068, 8069, 8070, 8073, 8079, 8080, 8081, 8082, 8083, 8084, 8087, 8088, 8089, 8091, 8092, 8093, 8094, 8098, 8105, 8108, 8109, 8110, 8111, 8112, 8113, 8114, 8115, 8116, 8117, 8118, 8120, 8121, 8124, 8125, 8126, 8127, 8128, 8130, 8131, 8132, 8135, 8137, 8141, 8142, 8143, 8144, 8145, 8147, 8150, 8151, 8152, 8154, 8155, 8156, 8160, 8161, 8163, 8167, 8168, 8171, 8172, 8173, 8175, 8176, 8179, 8181, 8183, 8187, 8189, 8190, 8192, 8193, 8194, 8197, 8201, 8202, 8204, 8212, 8213, 8214, 8215, 8217, 8219, 8222, 8224, 8225, 8226, 8227, 8228, 8229, 8231, 8232, 8233, 8236, 8238, 8239, 8242, 8244, 8248, 8249, 8251, 8254, 8256, 8258, 8259, 8260, 8262, 8264, 8265, 8266, 8267, 8268, 8269, 8270, 8272, 8273, 8274, 8276, 8277, 8278, 8279, 8281, 8284, 8285, 8286, 8287, 8289, 8290, 8291, 8292, 8293, 8294, 8296, 8300, 8301, 8302, 8303, 8307, 8308, 8311, 8312, 8313, 8314, 8316, 8318, 8319, 8320, 8322, 8324, 8326, 8329, 8330, 8331, 8335, 8336, 8337, 8338, 8339, 8341, 8343, 8345, 8348, 8349, 8350, 8351, 8352, 8353, 8354, 8355, 8356, 8359, 8360, 8364, 8367, 8369, 8370, 8375, 8376, 8380, 8381, 8385, 8388, 8389, 8390, 8391, 8393, 8395, 8396, 8397, 8401, 8402, 8403, 8408, 8409, 8411, 8412, 8414, 8415, 8416, 8418, 8420, 8422, 8423, 8427, 8430, 8431, 8432, 8435, 8437, 8439, 8440, 8441, 8443, 8444, 8445, 8446, 8447, 8448, 8449, 8451, 8453, 8454, 8456, 8459, 8464, 8465, 8466, 8467, 8471, 8472, 8474, 8475, 8477, 8482, 8483, 8484, 8485, 8487, 8488, 8489, 8492, 8493, 8495, 8496, 8498, 8499, 8500, 8502, 8503, 8505, 8509, 8510, 8511, 8512, 8513, 8514, 8515, 8518, 8519, 8520, 8521, 8522, 8524, 8525, 8526, 8527, 8529, 8534, 8535, 8537, 8538, 8539, 8540, 8541, 8542, 8543, 8546, 8547, 8549, 8553, 8555, 8556, 8558, 8559, 8560, 8562, 8563, 8567, 8568, 8570, 8571, 8573, 8574, 8575, 8576, 8578, 8579, 8580, 8581, 8583, 8585, 8586, 8588, 8590, 8592, 8594, 8595, 8596, 8597, 8598, 8599, 8601, 8604, 8605, 8606, 8607, 8608, 8609, 8613, 8616, 8617, 8618, 8620, 8621, 8624, 8625, 8626, 8631, 8633, 8637, 8638, 8639, 8641, 8642, 8643, 8644, 8648, 8650, 8651, 8656, 8658, 8659, 8660, 8661, 8662, 8663, 8666, 8668, 8669, 8670, 8671, 8672, 8675, 8676, 8677, 8678, 8680, 8681, 8683, 8685, 8686, 8688, 8689, 8691, 8692, 8694, 8695, 8696, 8697, 8699, 8706, 8707, 8708, 8713, 8715, 8716, 8717, 8718, 8719, 8721, 8722, 8723, 8727, 8730, 8731, 8732, 8733, 8734, 8735, 8738, 8741, 8743, 8745, 8746, 8748, 8751, 8757, 8758, 8759, 8761, 8762, 8763, 8764, 8765, 8766, 8768, 8770, 8771, 8773, 8774, 8775, 8777, 8778, 8782, 8783, 8785, 8788, 8792, 8793, 8794, 8795, 8799, 8800, 8802, 8807, 8808, 8809, 8810, 8811, 8812, 8814, 8815, 8819, 8820, 8821, 8822, 8823, 8824, 8826, 8827, 8828, 8829, 8830, 8831, 8833, 8834, 8837, 8838, 8839, 8840, 8841, 8842, 8847, 8848, 8849, 8850, 8851, 8853, 8855, 8856, 8862, 8863, 8865, 8867, 8871, 8872, 8873, 8874, 8875, 8876, 8877, 8879, 8887, 8888, 8889, 8890, 8895, 8896, 8897, 8898, 8899, 8902, 8903, 8906, 8907, 8909, 8914, 8915, 8916, 8917, 8918, 8919, 8920, 8921, 8922, 8924, 8925, 8926, 8928, 8929, 8932, 8935, 8936, 8937, 8939, 8940, 8941, 8942, 8946, 8947, 8949, 8964, 8967, 8968, 8969, 8970, 8972, 8974, 8979, 8982, 8983, 8985, 8986, 8988, 8989, 8990, 8993, 8994, 8996, 8998, 8999, 9001, 9002, 9003, 9005, 9009, 9010, 9011, 9012, 9013, 9014, 9015, 9016, 9018, 9021, 9022, 9024, 9025, 9027, 9028, 9029, 9030, 9032, 9053, 9058, 9059, 9060, 9062, 9064, 9065, 9066, 9067, 9069, 9070, 9071, 9072, 9073, 9074, 9075, 9077, 9079, 9081, 9082, 9084, 9085, 9086, 9087, 9088, 9089, 9090, 9094, 9095, 9098, 9100, 9101, 9104, 9105, 9106, 9107, 9111, 9113, 9116, 9117, 9119, 9121, 9122, 9123, 9124, 9125, 9126, 9128, 9129, 9130, 9131, 9132, 9133, 9135, 9136, 9137, 9138, 9139, 9141, 9142, 9143, 9144, 9145, 9147, 9148, 9150, 9152, 9153, 9154, 9157, 9158, 9161, 9162, 9165, 9166, 9167, 9170, 9171, 9172, 9173, 9174, 9175, 9177, 9178, 9179, 9181, 9182, 9183, 9184, 9186, 9187, 9188, 9191, 9192, 9194, 9195, 9199, 9200, 9201, 9203, 9205, 9206, 9209, 9210, 9212, 9213, 9215, 9216, 9218, 9219, 9221, 9222, 9223, 9225, 9226, 9227, 9229, 9230, 9231, 9234, 9235, 9237, 9238, 9239, 9240, 9242, 9244, 9247, 9249, 9251, 9252, 9253, 9254, 9256, 9257, 9261, 9263, 9264, 9265, 9267, 9268, 9270, 9272, 9276, 9277, 9279, 9281, 9282, 9285, 9287, 9288, 9289, 9290, 9294, 9295, 9297, 9301, 9302, 9303, 9307, 9309, 9311, 9312, 9313, 9314, 9315, 9316, 9318, 9319, 9320, 9322, 9324, 9326, 9327, 9328, 9330, 9331, 9332, 9333, 9334, 9335, 9336, 9338, 9339, 9340, 9342, 9345, 9346, 9348, 9353, 9354, 9355, 9358, 9359, 9360, 9361, 9365, 9368, 9369, 9370, 9371, 9372, 9375, 9376, 9377, 9379, 9380, 9381, 9383, 9386, 9387, 9391, 9395, 9397, 9398, 9400, 9401, 9402, 9403, 9404, 9406, 9407, 9408, 9409, 9410, 9411, 9413, 9414, 9416, 9418, 9421, 9423, 9424, 9426, 9427, 9429, 9430, 9431, 9432, 9437, 9439, 9440, 9442, 9445, 9448, 9450, 9452, 9455, 9456, 9457, 9458, 9459, 9460, 9461, 9464, 9465, 9467, 9469, 9471, 9474, 9478, 9479, 9481, 9483, 9484, 9485, 9487, 9488, 9489, 9490, 9492, 9493, 9494, 9495, 9498, 9503, 9505, 9507, 9509, 9513, 9515, 9519, 9521, 9526, 9527, 9529, 9530, 9531, 9532, 9534, 9536, 9537, 9538, 9541, 9542, 9543, 9545, 9546, 9548, 9549, 9551, 9552, 9553, 9554, 9555, 9558, 9560, 9566, 9567, 9569, 9571, 9572, 9575, 9576, 9578, 9580, 9581, 9582, 9586, 9588, 9589, 9592, 9596, 9598, 9600, 9603, 9607, 9608, 9609, 9610, 9611, 9612, 9614, 9615, 9617, 9619, 9620, 9621, 9622, 9624, 9625, 9626, 9627, 9628, 9631, 9634, 9636, 9637, 9638, 9639, 9640, 9643, 9644, 9646, 9647, 9649, 9657, 9658, 9660, 9662, 9663, 9664, 9665, 9666, 9668, 9669, 9671, 9673, 9674, 9675, 9676, 9677, 9678, 9681, 9685, 9688, 9691, 9692, 9693, 9694, 9695, 9696, 9697, 9700, 9701, 9702, 9703, 9706, 9707, 9710, 9711, 9712, 9715, 9717, 9718, 9721, 9722, 9725, 9730, 9732, 9733, 9735, 9738, 9739, 9740, 9741, 9742, 9743, 9744, 9745, 9746, 9750, and 9751

[0086] In a fourth aspect, the present invention relates to a polynucleotide encoding an artificial variant comprising a substitution, deletion, and/or insertion of one or more (several) amino acids of any of SEQ ID NOs: 4877-9751 or a homologous sequence thereof; or the mature polypeptide thereof. Preferably, amino acid changes are of a minor nature, that is conservative amino acid substitutions or insertions that do not significantly affect the folding and/or activity of the protein; small deletions, typically of one to about 30 amino acids; small amino- or carboxyl-terminal extensions, such as an amino-terminal methionine residue; a small linker peptide of up to about 20-25 residues; or a small extension that facilitates purification by changing net charge or another function, such as a poly-histidine tract, an antigenic epitope or a binding domain.

[0087] Examples of conservative substitutions are within the group of basic amino acids (arginine, lysine and histidine), acidic amino acids (glutamic acid and aspartic acid), polar amino acids (glutamine and asparagine), hydrophobic amino acids (leucine, isoleucine and valine), aromatic amino acids (phenylalanine, tryptophan and tyrosine), and small amino acids (glycine, alanine, serine, threonine and methionine). Amino acid substitutions that do not generally alter specific activity are known in the art and are described, for example, by H. Neurath and R. L. Hill, 1979, In, The Proteins, Academic Press, New York. The most commonly occurring exchanges are Ala/Ser, Val/Ile, Asp/Glu, Thr/Ser, Ala/Gly, Ala/Thr, Ser/Asn, Ala/Val, Ser/Gly, Tyr/Phe, Ala/Pro, Lys/Arg, Asp/Asn, Leu/Ile, Leu/Val, Ala/Glu, and Asp/Gly.

[0088] In addition to the 20 standard amino acids, non-standard amino acids (such as 4-hydroxyproline, 6-N-methyl lysine, 2-aminoisobutyric acid, isovaline, and alpha-methyl serine) may be substituted for amino acid residues of a wild-type polypeptide. A limited number of non-conservative amino acids, amino acids that are not encoded by the genetic code, and unnatural amino acids may be substituted for amino acid residues. “Unnatural amino acids” have been modified after protein synthesis, and/or have a chemical structure in their side chain(s) different from that of the standard amino acids. Unnatural amino acids can be chemically synthesized, and preferably, are commercially available, and include pipecolic acid, thiazolidine carboxylic acid, dehydroproline, 3- and 4-methylproline, and 3,3-dimethylproline.

[0089] Alternatively, the amino acid changes are of such a nature that the physico-chemical properties of the polypeptides are altered. For example, amino acid changes may improve the thermal stability of the polypeptide, alter the substrate specificity, change the pH optimum, and the like.

[0090] Essential amino acids in the parent polypeptide can be identified according to procedures known in the art, such as site-directed mutagenesis or alanine-scanning mutagenesis (Cunningham and Wells, 1989, Science 244: 1081-1085). In the latter technique, single alanine mutations are introduced at every residue in the molecule, and the resultant mutant molecules are tested for biological activity to identify amino acid residues that are critical to the activity of the molecule. See also, Hilton et al., 1996, J. Biol. Chem. 271: 4699-4708. The active site of the enzyme or other biological interaction can also be determined by physical analysis of structure, as determined by such techniques as nuclear magnetic resonance, crystallography, electron diffraction, or photoaffinity labeling, in conjunction with mutation of putative contact site amino acids. See, for example, de Vos et al., 1992, Science 255: 306-312; Smith et al., 1992, J. Mol. Biol. 224: 899-904; Wlodaver et al., 1992, FEBS Lett. 309: 59-64. The identities of essential amino acids can also be inferred from analysis of identities with polypeptides that are related to a polypeptide according to the invention.

[0091] Single or multiple amino acid substitutions, deletions, and/or insertions can be made and tested using known methods of mutagenesis, recombination, and/or shuffling, followed by a relevant screening procedure, such as those disclosed by Reidhaar-Olson and Sauer, 1988, Science 241: 53-57; Bowie and Sauer, 1989, Proc. Natl. Acad. Sci. USA 86: 2152-2156; WO 95/17413; or WO 95/22625. Other methods that can be used include error-prone PCR, phage display (e.g., Lowman et al., 1991, Biochem. 30: 10832-10837; U.S. Pat. No. 5,223,409; WO 92/06204), and region-directed mutagenesis (Derbyshire et al., 1986, Gene 46: 145; Ner et al., 1988, DNA 7: 127).

[0092] Mutagenesis/shuffling methods can be combined with high-throughput, automated screening methods to detect activity of cloned, mutagenized polypeptides expressed by host cells (Ness et al., 1999, Nature Biotechnology 17: 893-896). Mutagenized DNA molecules that encode active polypeptides can be recovered from the host cells and rapidly sequenced using standard methods in the art. These methods allow the rapid determination of the importance of individual amino acid residues in a polypeptide of interest, and can be applied to polypeptides of unknown structure.

[0093] The total number of amino acid substitutions, deletions and/or insertions of any of SEQ ID NOs: 4877-9751 is 10, preferably 9, more preferably 8, more preferably 7, more preferably at most 6, more preferably 5, more preferably 4, even more preferably 3, most preferably 2, and even most preferably 1.

### Biologically Active Substances

[0094] The present invention also relates to isolated biologically active substances, selected from the group consisting of:

[0095] (a) a biologically active substance comprising an amino acid sequence having preferably at least 60% identity, more preferably at least 65% identity, more preferably at least 70% identity, more preferably at least 75% identity, more preferably at least 80% identity, more preferably at least 85% identity, more preferably at least 90% identity, even more preferably at least 90% identity, most preferably at least 95% identity, and even most preferably at least 97% identity with an amino acid sequence selected from the group consisting of SEQ ID NOs: 4877-9751 and fragments thereof retaining biological activity;

[0096] (b) a biologically active substance encoded by a polynucleotide comprising a nucleotide sequence having preferably at least 60% identity, more preferably at least 65% identity, more preferably at least 70% identity, more preferably at least 75% identity, more preferably at least 80% identity, more preferably at least 85% identity, more preferably at least 90% identity, even more preferably at least 90% identity, most preferably at least 95% identity, and even most preferably at least 97% identity with a polynucleotide selected from the group consisting of SEQ ID NOs: 2-4876 and subsequences thereof encoding fragments having biological activity;

[0097] (c) a biologically active substance encoded by a polynucleotide comprising a nucleotide sequence that hybridizes under preferably at least medium stringency conditions, more preferably at least medium-high stringency conditions, or most preferably at least high stringency conditions with a polynucleotide selected from the group consisting of SEQ ID NOs: 2-4876 and full-length complementary strands thereof; and

[0098] (d) an artificial variant comprising a substitution, deletion, and/or insertion of one or more (several) amino acids of an amino acid sequence selected from the group consisting of SEQ ID NOs: 4877-9751 and fragments thereof retaining biological activity.

[0099] In a first aspect, the present invention also relates to an isolated biologically active substance comprising an amino acid sequence having a degree of sequence identity to any of SEQ ID NOs: 4877-9751 of at least 60%, preferably at least 65%, more preferably at least 70%, more preferably at least 75%, more preferably at least 80%, more preferably at least 85%, even more preferably at least 90%, most preferably at least 95%, and even most preferably at least 97%, which have biological activity (hereinafter “homologous polypeptides”). In a preferred aspect, the homologous polypeptides have an amino acid sequence that differs by ten amino acids, preferably by five amino acids, more preferably by four amino acids, even more preferably by three amino acids, most preferably by two amino acids, and even most preferably by one amino acid from the amino acid sequences of SEQ ID NOs: 4877-9751.

[0100] In a preferred aspect, the present invention relates to an isolated biological substance comprising an amino acid sequence having a degree of sequence identity of preferably at least 60% identity, more preferably at least 65% identity, more preferably at least 70% identity, more preferably at least 75% identity, more preferably at least 80%, more preferably at least 85%, even more preferably at least 90%, most preferably at least 95%, and even most preferably at least 97% with an amino acid sequence selected from the group consisting of SEQ ID NOs: 4944, 4985, 5051, 5058, 5064, 5076, 5079, 5097, 5098, 5099, 5106, 5115, 5117, 5136, 5137, 5197, 5204, 5286, 5459, 5529, 5604, 5723, 5724, 5725, 5726, 5761, 5923, 6056, 6097, 6153, 6192, 6371, 6372, 6376, 6456, 6504, 6531, 6545, 6546, 6547, 6548, 6550, 6945, 6965, 7053, 7116, 7163, 7164, 7165, 7166, 7169, 7170, 7174, 7176, 7177, 7363, 7392, 7397, 7399, 7402, 7420, 7421, 7423, 7425, 7438, 7449, 7453, 7468, 7507, 7562, 7563, 7565, 7573, 7641, 7815, 8003, 8008, 8009, 8010, 8011, 8014, 8015, 8018, 8020, 8021, 8022, 8046, 8099, 8100, 8103, 8140, 8323, 8710, 8711, 8966, 9034, 9035, 9036, 9049, 9051, 9054, 9056, 9057, 9224, 9516, 9525, 9547, 9562, 9564, 4900, 4925, 4930, 4952, 4957, 4966, 4973, 4978, 5000, 5010, 5044, 5046, 5047, 5049, 5052, 5053, 5054, 5055, 5056, 5057, 5060, 5061, 5062, 5067, 5069, 5070, 5071, 5073, 5074, 5078, 5080, 5081, 5082, 5083, 5084, 5085, 5086, 5087, 5088, 5089, 5090, 5091, 5092, 5093, 5094, 5095, 5096, 5100, 5101, 5102, 5103, 5104, 5105, 5112, 5116, 5118, 5119, 5120, 5121, 5122, 5123, 5124, 5125, 5126, 5127, 5128, 5129, 5130, 5131, 5132, 5133, 5134, 5135, 5138, 5139, 5140, 5141, 5151, 5162, 5173, 5180, 5181, 5183, 5192, 5198, 5225, 5229, 5235, 5236, 5238, 5242, 5249, 5256, 5290, 5297, 5307, 5320, 5344, 5347, 5353, 5354, 5362, 5363, 5366, 5373, 5391, 5396, 5398, 5399, 5412, 5416, 5428, 5445, 5450, 5456, 5467, 5482, 5493, 5496, 5502, 5503, 5506, 5541, 5547, 5563, 5566, 5574, 5577, 5585, 5594, 5601, 5609, 5623, 5626, 5639, 5648, 5649, 5652, 5664, 5666, 5702, 5704, 5706, 5708, 5717, 5722, 5730, 5732, 5760, 5762, 5776, 5784, 5819, 5832, 5852, 5857, 5866, 5869, 5890, 5893, 5897, 5907, 5909, 5912, 5933, 5953, 5955, 5963, 5966, 5973, 5983, 5986, 5987, 5993, 6003, 6005, 6023, 6026, 6028, 6029, 6033, 6035, 6039, 6045, 6050, 6051, 6052, 6055, 6058, 6059, 6068, 6069, 6074, 6083, 6090, 6095, 6112, 6119, 6137, 6138, 6140, 6141, 6167, 6177, 6188, 6189, 6190, 6191, 6193, 6195, 6209, 6220, 6230, 6245, 6248, 6249, 6276, 6286, 6294, 6296, 6299, 6307, 6308, 6315, 6317, 6323, 6330, 6341, 6345, 6384, 6402, 6414, 6431, 6440, 6445, 6464, 6494, 6506, 6509, 6510, 6511, 6513, 6514, 6515, 6516, 6517, 6518, 6519, 6520, 6521, 6522, 6524, 6525, 6526, 6527, 6528, 6529, 6530, 6532, 6533, 6534, 6535, 6536, 6537, 6538, 6539, 6540, 6541, 6542, 6543, 6544, 6552, 6557, 6559, 6563, 6567, 6569, 6572, 6578, 6579, 6603, 6607, 6609, 6611, 6626, 6650, 6654, 6658, 6661, 6667, 6670, 6673, 6691, 6706, 6711, 6713, 6726, 6728, 6741, 6758, 6762, 6819, 6821, 6877, 6882, 6897, 6913, 6919, 6923, 6940, 6942, 6947, 6951, 6958, 6969, 6981, 6984, 6994, 6995, 6996, 6999, 7006, 7014, 7022, 7023, 7041, 7046, 7069, 7071, 7073, 7079, 7080, 7086, 7088, 7091, 7096, 7100, 7105, 7111, 7115, 7129, 7130, 7133, 7138, 7148, 7152, 7157, 7161, 7167, 7171, 7172, 7173, 7175, 7178, 7179, 7180, 7199, 7200, 7202, 7211, 7212, 7216, 7222, 7226, 7229, 7237, 7239, 7256, 7263, 7275, 7278, 7279, 7283, 7285, 7286, 7287, 7289, 7290, 7299, 7300, 7305, 7310, 7314, 7321, 7324, 7332, 7339, 7342, 7343, 7344, 7351, 7358, 7366, 7373, 7375, 7379, 7380, 7381, 7382, 7383, 7384, 7385, 7386, 7387, 7388, 7389, 7390, 7391, 7393, 7394, 7395, 7396, 7400, 7401, 7403, 7404, 7405, 7406, 7407, 7408, 7409, 7410, 7411, 7412, 7413, 7414, 7415, 7416, 7417, 7418, 7419, 7422, 7424, 7426, 7427, 7428, 7429, 7430, 7431, 7432, 7433, 7434, 7435, 7436, 7437, 7439, 7440, 7442, 7443, 7444, 7445, 7446, 7447, 7448, 7450, 7451, 7452, 7454, 7455, 7456, 7457, 7458, 7459, 7460, 7461, 7462, 7463, 7464, 7465, 7466, 7467, 7469, 7470, 7471, 7472, 7473, 7474, 7475, 7476, 7477, 7478, 7479, 7480, 7481, 7482, 7483, 7484, 7485, 7486, 7487, 7488, 7489, 7490, 7491, 7492, 7493, 7494, 7495, 7496, 7497, 7498, 7499, 7500, 7501, 7502, 7503, 7504, 7505, 7506, 7508, 7509, 7510, 7511, 7513, 7514, 7515, 7516, 7517, 7518, 7519, 7520, 7521, 7522, 7523, 7524, 7525, 7526, 7527, 7528, 7529, 7530, 7531, 7532, 7533, 7534, 7536, 7539, 7540, 7542, 7544, 7545, 7546, 7547, 7548, 7549, 7550, 7551, 7552, 7553, 7554, 7555, 7556, 7559, 7560, 7561, 7564, 7566, 7567, 7568, 7571, 7572, 7581, 7583, 7592, 7595, 7598, 7605, 7608, 7626, 7637, 7646, 7670, 7681, 7688, 7709, 7710, 7716, 7725, 7741, 7742, 7749, 7753, 7758, 7766, 7773, 7777, 7779, 7792, 7822, 7832, 7835, 7844, 7847, 7848, 7874, 7879, 7893, 7894, 7903, 7921, 7929, 7939, 7944, 7957, 7962, 7968, 7987, 7998, 8012, 8016, 8017, 8019, 8023, 8024, 8025, 8037, 8090, 8097, 8101, 8102, 8104, 8106, 8119, 8123, 8134, 8136, 8139, 8162, 8166, 8174, 8178, 8185, 8186, 8196, 8198, 8199, 8208, 8230, 8237, 8246, 8299, 8304, 8306, 8309, 8317, 8321, 8332, 8333, 8346, 8361, 8368, 8371, 8374, 8378, 8379, 8383, 8384, 8394, 8424, 8433, 8452, 8462, 8468, 8473, 8476, 8478, 8481, 8486, 8517, 8528, 8530, 8545, 8548, 8557, 8565, 8569, 8582, 8584, 8591, 8602, 8610, 8611, 8612, 8619, 8628, 8640, 8645, 8655, 8665, 8667, 8673, 8674, 8693, 8700, 8714, 8747, 8754, 8756, 8760, 8779, 8786, 8790, 8791, 8797, 8801, 8806, 8813, 8844, 8886, 8892, 8893, 8908, 8912, 8923, 8930, 8931, 8934, 8943, 8951, 8952, 8953, 8956, 8957, 8960, 8961, 8965, 8981, 8987, 8992, 9019, 9020, 9033, 9037, 9038, 9039, 9040, 9041, 9042, 9043, 9044, 9045, 9046, 9047, 9048, 9050, 9076, 9096, 9110, 9114, 9118, 9160, 9163, 9180, 9198, 9208, 9211, 9228, 9245, 9273, 9284, 9292, 9296, 9298, 9304, 9310, 9321, 9323, 9325, 9337, 9344, 9347, 9349, 9351, 9357, 9362, 9363, 9374, 9384, 9385, 9388, 9393, 9419, 9433, 9434, 9435, 9436, 9444, 9446, 9453, 9475, 9480, 9482, 9497, 9506, 9508, 9518, 9520, 9522, 9523, 9524, 9533, 9544, 9557, 9568, 9579, 9583, 9593, 9597, 9629, 9642, 9661, 9667, 9672, 9679, 9687, 9689, 9698, 9705, 9708, 9713, 9723, 9724, 9729, 9734, 9737, and 9747; preferably at least 65% identity, more preferably at least 70% identity, more preferably at least 75% identity, more preferably at least 80%, more preferably at least 85%, even more preferably at least 90%, most preferably at least 95%, and even most preferably at least 97% with an amino acid sequence selected from the group consisting of SEQ ID NOs: 4991, 5068, 5308, 5463, 5919, 6549, 6648, 6680, 6948, 7298, 7541, 7896, 7911, 8497, 8702, 8729, 8737, 9052, 9690, and 9709; preferably at least 70% identity, more preferably at least 75% identity, more preferably at least 80%, more preferably at least 85%, even more preferably at least 90%, most preferably at least 95%, and even most preferably at least 97% with an amino acid sequence selected from the group consisting of SEQ ID NOs: 4986, 5041, 5043, 5418, 5427, 5500, 5515, 5696, 5713, 5785, 5939, 6106, 6109, 6171, 6260, 6503, 6677, 6724, 7054, 7260, 7295, 7316, 7341, 7512, 7538, 7591, 7628, 7735, 7912, 8050, 8076, 8206, 8207, 8240, 8327, 8406, 8428, 8860, 8955, 9061, 9099, 9115, 9262, 9591, 9641, and 9720; preferably at least 75% identity, more preferably at least 80%, more preferably at least 85%, even more preferably at least 90%, most preferably at least 95%, and even most preferably at least 97% with an amino acid sequence selected from the group consisting of SEQ ID NOs: 5038, 5059, 5240, 5403, 5444, 5508, 5559, 5562, 5642, 5651, 5846, 5885, 5921, 5942, 6015, 6067, 6071, 6164, 6215, 6293, 6373, 6390, 6446, 6624, 6704, 6717, 6749, 6759, 6808, 6847, 6848, 6852, 6854, 7292, 7297, 7308, 7317, 7537, 7543, 7557, 7603, 7651, 7858, 7949, 7954, 7996, 8074, 8200, 8221, 8263, 8288, 8614, 8684, 8720, 8728, 8740, 8749, 8787, 8864, 8958, 9055, 9176, 9196, 9283, 9308, 9352, 9491, 9512, 9602, 9653, 9684, 9719, and 9731; preferably at least 80% identity, more preferably at least 85% identity, even more preferably at least 90% identity, most preferably at least 95% identity, and even most preferably at least 97% identity with an amino acid sequence selected from the group consisting of SEQ ID NOs: 4891, 4956, 5042, 5072, 5169, 5190, 5195, 5217, 5241, 5266, 5305, 5369, 5374, 5377, 5409, 5435, 5512, 5524, 5538, 5595, 5613, 5647, 5657, 5665, 5667, 5735, 5743, 5830, 5878, 5900, 5903, 5977, 5988, 6000, 6060, 6066, 6070, 6073, 6075, 6105, 6120, 6139, 6152, 6174, 6291, 6335, 6375, 6437, 6466, 6492, 6505, 6507, 6523, 6553, 6592, 6651, 6694, 6730, 6732, 6774, 6843, 6929, 6943, 6964, 7093, 7132, 7144, 7224, 7349, 7374, 7398, 7570, 7578, 7632, 7635, 7643, 7680, 7682, 7685, 7700, 7713, 7727, 7800, 7843, 7864, 7918, 7947, 7982, 7989, 7991, 7999, 8055, 8057, 8085, 8095, 8170, 8182, 8191, 8210, 8255, 8261, 8328, 8365, 8399, 8410, 8479, 8551, 8561, 8577, 8589, 8649, 8679, 8742, 8744, 8784, 8789, 8796, 8818, 8832, 8835, 8845, 8854, 8858, 8868, 8878, 8900, 8950, 9007, 9102, 9108, 9151, 9169, 9207, 9241, 9246, 9248, 9250, 9299, 9341, 9343, 9412, 9443, 9470, 9476, 9511, 9528, 9559, 9565, 9577, 9584, 9594, 9595, 9682, and 9714; preferably at least 85% identity, more preferably at least 90% identity, most preferably at least 95% identity, and even most preferably at least 97% identity with an amino acid sequence selected from the group consisting of SEQ ID NOs: 4913, 4948, 4968, 5025, 5034, 5066, 5109, 5110, 5146, 5160, 5199, 5200, 5203, 5211, 5221, 5223, 5226, 5252, 5269, 5273, 5293, 5309, 5318, 5342, 5352, 5393, 5394, 5421, 5430, 5431, 5434, 5447, 5458, 5492, 5507, 5511, 5514, 5525, 5526, 5530, 5544, 5570, 5616, 5617, 5621, 5640, 5661, 5663, 5691, 5716, 5738, 5751, 5753, 5757, 5759, 5786, 5802, 5820, 5826, 5855, 5858, 5871, 5872, 5902, 5905, 5908, 5915, 5936, 5937, 5938, 5947, 6006, 6011, 6012, 6025, 6030, 6032, 6034, 6057, 6080, 6084, 6093, 6096, 6110, 6131, 6178, 6183, 6199, 6232, 6236, 6243, 6257, 6258, 6313, 6331, 6354, 6360, 6362, 6386, 6417, 6421, 6435, 6455, 6468, 6472, 6475, 6476, 6478, 6495, 6555, 6566, 6568, 6604, 6608, 6641, 6662, 6663, 6665, 6692, 6699, 6736, 6752, 6763, 6807, 6809, 6810, 6840, 6842, 6844, 6853, 6855, 6857, 6866, 6906, 6908, 6915, 6922, 6953, 6962, 6977, 6989, 7004, 7025, 7032, 7042, 7045, 7058, 7072, 7085, 7134, 7139, 7145, 7182, 7188, 7194, 7208, 7227, 7249, 7261, 7272, 7293, 7309, 7320, 7331, 7333, 7334, 7354, 7367, 7371, 7558, 7597, 7602, 7623, 7664, 7677, 7679, 7687, 7732, 7734, 7739, 7744, 7752, 7765, 7769, 7790, 7801, 7818, 7823, 7833, 7837, 7860, 7867, 7877, 7882, 7915, 7931, 7932, 7946, 7948, 7959, 7967, 7973, 7975, 7977, 7978, 7986, 8071, 8072, 8096, 8107, 8129, 8146, 8148, 8153, 8164, 8165, 8169, 8203, 8211, 8216, 8218, 8234, 8245, 8253, 8275, 8297, 8315, 8334, 8340, 8357, 8362, 8372, 8386, 8398, 8425, 8438, 8455, 8460, 8470, 8480, 8490, 8506, 8531, 8533, 8572, 8593, 8600, 8615, 8623, 8627, 8630, 8634, 8664, 8687, 8703, 8704, 8705, 8726, 8739, 8750, 8752, 8753, 8769, 8780, 8781, 8805, 8816, 8825, 8846, 8869, 8870, 8883, 8913, 8938, 8944, 8945, 8948, 8959, 8962, 8973, 8976, 8980, 8991, 9000, 9006, 9017, 9068, 9093, 9097, 9103, 9109, 9146, 9155, 9159, 9255, 9258, 9260, 9266, 9269, 9271, 9278, 9293, 9350, 9373, 9394, 9415, 9420, 9449, 9466, 9472, 9477, 9486, 9500, 9504, 9514, 9517, 9535, 9573, 9590, 9599, 9601, 9623, 9645, 9648, 9652, 9654, 9659, 9726, 9728, 9736, and 9748; preferably at least 90% identity, more preferably at least 95% identity, and most preferably at least 97% identity with an amino acid sequence selected from the group consisting of SEQ ID NOs: 4890, 4895, 4921, 4923, 4927, 4933, 4934, 4937, 4939, 4943, 4946, 4950, 4951, 4955, 4958, 4967, 4970, 4981, 4982, 4987, 4989, 4999, 5017, 5022, 5029, 5048, 5111, 5113, 5145, 5152, 5157, 5165, 5171, 5178, 5179, 5182, 5186, 5202, 5213, 5214, 5215, 5218, 5227, 5230, 5233, 5245, 5268, 5272, 5274, 5279, 5281, 5283, 5298, 5303, 5315, 5324, 5326, 5328, 5329, 5330, 5336, 5337, 5338, 5339, 5346, 5357, 5360, 5376, 5380, 5387, 5400, 5401, 5414, 5417, 5419, 5422, 5424, 5436, 5442, 5446, 5448, 5455, 5457, 5466, 5475, 5499, 5501, 5510, 5537, 5539, 5542, 5550, 5552, 5557, 5565, 5571, 5573, 5586, 5589, 5612, 5615, 5620, 5622, 5628, 5632, 5634, 5638, 5645, 5646, 5660, 5670, 5677, 5678, 5681, 5688, 5705, 5707, 5710, 5739, 5748, 5754, 5756, 5763, 5764, 5765, 5766, 5768, 5779, 5782, 5783, 5787, 5791, 5792, 5793, 5799, 5808, 5813, 5821, 5827, 5828, 5834, 5835, 5837, 5842, 5850, 5856, 5859, 5864, 5870, 5884, 5906, 5914, 5917, 5945, 5946, 5958, 5964, 5965, 5985, 5989, 5994, 5998, 6007, 6009, 6016, 6017, 6019, 6022, 6031, 6048, 6062, 6064, 6079, 6081, 6086, 6089, 6098, 6103, 6107, 6113, 6121, 6122, 6125, 6156, 6163, 6165, 6181, 6205, 6212, 6223, 6235, 6238, 6239, 6242, 6244, 6250, 6251, 6255, 6261, 6262, 6265, 6267, 6269, 6281, 6283, 6284, 6290, 6292, 6300, 6301, 6318, 6324, 6327, 6332, 6333, 6338, 6339, 6344, 6349, 6353, 6361, 6363, 6374, 6377, 6383, 6387, 6396, 6397, 6399, 6400, 6413, 6423, 6449, 6450, 6462, 6465, 6467, 6471, 6484, 6493, 6501, 6512, 6565, 6573, 6574, 6575, 6576, 6580, 6583, 6585, 6589, 6594, 6598, 6600, 6605, 6619, 6629, 6635, 6636, 6637, 6638, 6642, 6647, 6664, 6669, 6686, 6688, 6695, 6696, 6697, 6698, 6700, 6710, 6712, 6729, 6735, 6740, 6742, 6743, 6744, 6745, 6768, 6779, 6780, 6781, 6782, 6786, 6792, 6793, 6795, 6800, 6801, 6802, 6804, 6823, 6827, 6829, 6833, 6834, 6836, 6838, 6861, 6862, 6863, 6867, 6868, 6871, 6872, 6887, 6903, 6918, 6920, 6927, 6933, 6939, 6944, 6949, 6960, 6966, 6973, 6976, 6979, 7000, 7002, 7015, 7017, 7019, 7036, 7040, 7051, 7055, 7056, 7063, 7075, 7077, 7087, 7090, 7092, 7097, 7102, 7103, 7104, 7109, 7112, 7117, 7118, 7122, 7123, 7125, 7126, 7127, 7158, 7162, 7181, 7186, 7196, 7201, 7203, 7206, 7209, 7210, 7219, 7221, 7230, 7231, 7232, 7233, 7235, 7236, 7244, 7248, 7251, 7252, 7257, 7268, 7271, 7274, 7281, 7304, 7326, 7335, 7352, 7356, 7357, 7360, 7364, 7577, 7579, 7601, 7607, 7615, 7624, 7625, 7639, 7650, 7658, 7672, 7696, 7712, 7718, 7728, 7729, 7730, 7745, 7747, 7748, 7751, 7754, 7756, 7774, 7780, 7786, 7808, 7810, 7826, 7831, 7840, 7849, 7854, 7871, 7872, 7886, 7892, 7914, 7925, 7928, 7933, 7934, 7937, 7941, 7945, 7969, 7970, 7980, 8032, 8039, 8040, 8060, 8063, 8065, 8066, 8075, 8077, 8078, 8086, 8122, 8133, 8138, 8149, 8157, 8158, 8159, 8177, 8180, 8184, 8188, 8195, 8205, 8209, 8220, 8223, 8235, 8241, 8243, 8247, 8250, 8252, 8257, 8271, 8280, 8282, 8283, 8295, 8298, 8305, 8310, 8325, 8342, 8344, 8347, 8358, 8363, 8366, 8373, 8377, 8382, 8387, 8392, 8400, 8404, 8405, 8407, 8413, 8417, 8419, 8421, 8426, 8429, 8434, 8436, 8442, 8450, 8457, 8458, 8461, 8463, 8469, 8491, 8494, 8501, 8504, 8507, 8508, 8516, 8523, 8532, 8536, 8544, 8550, 8552, 8554, 8564, 8566, 8587, 8603, 8622, 8629, 8632, 8635, 8636, 8646, 8647, 8652, 8653, 8654, 8657, 8682, 8690, 8698, 8701, 8709, 8712, 8724, 8725, 8736, 8755, 8767, 8772, 8776, 8798, 8803, 8804, 8817, 8836, 8843, 8852, 8857, 8859, 8861, 8866, 8880, 8881, 8882, 8884, 8885, 8891, 8894, 8901, 8904, 8905, 8910, 8911, 8927, 8933, 8954, 8963, 8971, 8975, 8977, 8984, 8995, 8997, 9004, 9008, 9023, 9026, 9031, 9063, 9078, 9080, 9083, 9091, 9092, 9112, 9120, 9127, 9134, 9140, 9149, 9156, 9164, 9168, 9185, 9189, 9190, 9193, 9197, 9202, 9204, 9214, 9217, 9220, 9232, 9233, 9236, 9243, 9259, 9274, 9275, 9280, 9286, 9291, 9300, 9305, 9306, 9317, 9329, 9356, 9364, 9366, 9367, 9378, 9382, 9389, 9390, 9392, 9396, 9399, 9405, 9417, 9422, 9425, 9428, 9438, 9441, 9451, 9454, 9462, 9463, 9468, 9473, 9496, 9499, 9501, 9502, 9510, 9539, 9540, 9550, 9556, 9561, 9570, 9574, 9585, 9587, 9604, 9605, 9606, 9613, 9616, 9618, 9630, 9632, 9633, 9635, 9650, 9651, 9655, 9656, 9670, 9680, 9683, 9686, 9699, 9704, 9716, 9727, and 9749; or preferably at least 95% identity and more preferably at least 97% identity with an amino acid sequence selected from the group consisting of SEQ ID NOs: 4877, 4878, 4879, 4880, 4881, 4882, 4883, 4884, 4885, 4886, 4887, 4888, 4889, 4892, 4893, 4894, 4896, 4897, 4898, 4899, 4901, 4902, 4903, 4904, 4905, 4906, 4907, 4908, 4909, 4910, 4911, 4912, 4914, 4915, 4916, 4917, 4918, 4919, 4920, 4922, 4924, 4926, 4928, 4929, 4931, 4932, 4935, 4936, 4938, 4940, 4941, 4942, 4945, 4947, 4949, 4953, 4954, 4959, 4960, 4961, 4962, 4963, 4964, 4965, 4969, 4971, 4972, 4974, 4975, 4976, 4977, 4979, 4980, 4983, 4984, 4988, 4990, 4992, 4993, 4994, 4995, 4996, 4997, 4998, 5001, 5002, 5003, 5004, 5005, 5006, 5007, 5008, 5009, 5011, 5012, 5013, 5014, 5015, 5016, 5018, 5019, 5020, 5021, 5023, 5024, 5026, 5027, 5028, 5030, 5031, 5032, 5033, 5035, 5036, 5037, 5039, 5045, 5050, 5063, 5065, 5075, 5077, 5107, 5108, 5114, 5142, 5143, 5144, 5147, 5148, 5149, 5150, 5153, 5154, 5155, 5156, 5158, 5159, 5161, 5163, 5164, 5166, 5167, 5168, 5170, 5172, 5174, 5175, 5176, 5177, 5184, 5185, 5187, 5188, 5189, 5191, 5193, 5194, 5196, 5201, 5205, 5206, 5207, 5208, 5209, 5210, 5212, 5216, 5219, 5220, 5222, 5224, 5228, 5231, 5232, 5234, 5237, 5239, 5243, 5244, 5246, 5247, 5248, 5250, 5251, 5254, 5255, 5257, 5258, 5259, 5260, 5261, 5262, 5263, 5264, 5265, 5267, 5270, 5271, 5275, 5276, 5277, 5278, 5280, 5282, 5284, 5285, 5287, 5288, 5289, 5291, 5292, 5294, 5295, 5296, 5299, 5300, 5301, 5302, 5304, 5306, 5310, 5311, 5312, 5313, 5314, 5316, 5317, 5319, 5321, 5322, 5323, 5325, 5327, 5331, 5332, 5333, 5334, 5335, 5340, 5341, 5343, 5345, 5348, 5349, 5350, 5351, 5355, 5356, 5358, 5359, 5361, 5364, 5365, 5367, 5368, 5370, 5371, 5372, 5375, 5379, 5381, 5382, 5383, 5384, 5385, 5386, 5388, 5389, 5390, 5392, 5395, 5397, 5402, 5404, 5405, 5406, 5407, 5408, 5410, 5411, 5413, 5415, 5420, 5423, 5425, 5426, 5429, 5432, 5433, 5437, 5438, 5439, 5440, 5441, 5443, 5449, 5451, 5452, 5453, 5454, 5460, 5461, 5462, 5464, 5465, 5468, 5469, 5470, 5471, 5472, 5473, 5474, 5476, 5477, 5478, 5479, 5480, 5481, 5483, 5484, 5485, 5486, 5487, 5488, 5489, 5490, 5491, 5494, 5495, 5497, 5498, 5504, 5505, 5509, 5513, 5516, 5517, 5518, 5519, 5520, 5521, 5522, 5523, 5527, 5528, 5531, 5532, 5533, 5534, 5535, 5536, 5540, 5543, 5545, 5546, 5548, 5549, 5551, 5553, 5554, 5555, 5556, 5558, 5560, 5561, 5564, 5567, 5568, 5569, 5572, 5575, 5576, 5578, 5579, 5580, 5581, 5582, 5583, 5584, 5587, 5588, 5590, 5591, 5592, 5593, 5596, 5597, 5598, 5599, 5600, 5602, 5603, 5605, 5606, 5607, 5608, 5610, 5611, 5614, 5618, 5619, 5624, 5625, 5627, 5629, 5630, 5631, 5633, 5635, 5636, 5637, 5641, 5643, 5644, 5650, 5653, 5654, 5655, 5656, 5658, 5659, 5662, 5668, 5669, 5671, 5672, 5673, 5674, 5675, 5676, 5679, 5680, 5682, 5683, 5684, 5685, 5686, 5687, 5689, 5690, 5692, 5693, 5694, 5695, 5697, 5698, 5699, 5700, 5701, 5703, 5709, 5711, 5712, 5714, 5715, 5718, 5719, 5720, 5721, 5728, 5729, 5731, 5733, 5734, 5736, 5737, 5740, 5741, 5742, 5744, 5745, 5746, 5747, 5749, 5750, 5752, 5755, 5758, 5767, 5769, 5770, 5771, 5772, 5773, 5774, 5775, 5777, 5778, 5780, 5781, 5788, 5789, 5790, 5794, 5795, 5796, 5797, 5798, 5800, 5801, 5803, 5804, 5805, 5806, 5807, 5809, 5810, 5811, 5812, 5814, 5815, 5816, 5817, 5818, 5822, 5823, 5824, 5825, 5829, 5831, 5833, 5836, 5838, 5839, 5840, 5841, 5843, 5844, 5845, 5847, 5848, 5849, 5851, 5853, 5854, 5860, 5861, 5862, 5863, 5865, 5867, 5868, 5873, 5874, 5875, 5876, 5877, 5879, 5880, 5881, 5882, 5883, 5886, 5887, 5888, 5889, 5891, 5892, 5894, 5895, 5896, 5899, 5901, 5904, 5910, 5911, 5913, 5916, 5918, 5920, 5922, 5924, 5925, 5926, 5927, 5928, 5929, 5930, 5931, 5932, 5934, 5935, 5940, 5941, 5943, 5944, 5948, 5949, 5950, 5951, 5952, 5954, 5956, 5957, 5959, 5960, 5961, 5962, 5967, 5968, 5969, 5970, 5971, 5972, 5974, 5975, 5976, 5978, 5979, 5980, 5981, 5982, 5984, 5990, 5991, 5992, 5995, 5996, 5997, 5999, 6001, 6002, 6004, 6008, 6010, 6013, 6014, 6018, 6020, 6021, 6024, 6027, 6036, 6037, 6038, 6040, 6041, 6042, 6043, 6044, 6046, 6047, 6049, 6053, 6054, 6061, 6063, 6065, 6072, 6076, 6077, 6078, 6082, 6085, 6087, 6088, 6091, 6092, 6094, 6099, 6100, 6101, 6102, 6104, 6108, 6111, 6114, 6115, 6116, 6117, 6118, 6123, 6124, 6126, 6127, 6128, 6129, 6130, 6132, 6133, 6134, 6135, 6136, 6142, 6143, 6144, 6145, 6146, 6147, 6148, 6149, 6150, 6151, 6154, 6155, 6157, 6158, 6159, 6160, 6161, 6162, 6166, 6168, 6169, 6170, 6172, 6173, 6175, 6176, 6179, 6180, 6182, 6184, 6185, 6186, 6187, 6194, 6196, 6197, 6198, 6200, 6201, 6202, 6203, 6204, 6206, 6207, 6208, 6210, 6211, 6213, 6214, 6216, 6217, 6218, 6219, 6221, 6222, 6224, 6225, 6226, 6227, 6228, 6229, 6231, 6233, 6234, 6237, 6240, 6246, 6247, 6252, 6253, 6254, 6256, 6259, 6263, 6264, 6266, 6268, 6270, 6271, 6272, 6273, 6274, 6275, 6277, 6278, 6279, 6280, 6282, 6285, 6287, 6288, 6289, 6295, 6297, 6298, 6302, 6303, 6304, 6305, 6306, 6309, 6310, 6311, 6312, 6314, 6316, 6319, 6320, 6321, 6322, 6325, 6326, 6328, 6329, 6336, 6337, 6340, 6342, 6343, 6346, 6347, 6348, 6350, 6351, 6352, 6355, 6356, 6357, 6358, 6359, 6364, 6365, 6366, 6367, 6368, 6369, 6378, 6379, 6380, 6381, 6382, 6385, 6388, 6389, 6391, 6392, 6393, 6394, 6395, 6398, 6401, 6403, 6404, 6405, 6406, 6407, 6408, 6409, 6410, 6411, 6412, 6415, 6416, 6418, 6419, 6420, 6422, 6424, 6425, 6426, 6427, 6428, 6429, 6430, 6432, 6433, 6434, 6436, 6438, 6439, 6441, 6442, 6443, 6444, 6447, 6448, 6451, 6452, 6453, 6454, 6457, 6458, 6459, 6460, 6461, 6463, 6469, 6470, 6473, 6474, 6477, 6479, 6480, 6481, 6482, 6483, 6485, 6486, 6487, 6488, 6489, 6490, 6491, 6496, 6497, 6498, 6499, 6500, 6502, 6508, 6556, 6558, 6560, 6561, 6562, 6564, 6570, 6571, 6577, 6581, 6582, 6584, 6586, 6587, 6588, 6590, 6591, 6593, 6595, 6596, 6597, 6599, 6601, 6602, 6606, 6610, 6612, 6613, 6614, 6615, 6616, 6617, 6618, 6620, 6621, 6622, 6623, 6625, 6627, 6628, 6630, 6631, 6632, 6633, 6634, 6639, 6640, 6643, 6644, 6645, 6646, 6649, 6652, 6653, 6655, 6656, 6657, 6659, 6660, 6666, 6668, 6671, 6672, 6674, 6675, 6676, 6678, 6679, 6681, 6682, 6683, 6684, 6685, 6687, 6689, 6690, 6693, 6701, 6702, 6703, 6705, 6707, 6708, 6709, 6714, 6715, 6716, 6718, 6719, 6720, 6721, 6722, 6723, 6725, 6727, 6731, 6733, 6734, 6737, 6738, 6739, 6746, 6747, 6748, 6750, 6751, 6753, 6754, 6755, 6756, 6757, 6760, 6761, 6764, 6765, 6766, 6767, 6769, 6770, 6771, 6772, 6773, 6775, 6776, 6777, 6778, 6783, 6784, 6785, 6787, 6788, 6789, 6790, 6791, 6794, 6796, 6797, 6798, 6799, 6803, 6805, 6806, 6811, 6812, 6813, 6814, 6815, 6816, 6817, 6818, 6820, 6822, 6824, 6825, 6826, 6828, 6830, 6831, 6832, 6835, 6837, 6839, 6841, 6845, 6846, 6849, 6850, 6851, 6856, 6858, 6859, 6860, 6864, 6865, 6869, 6870, 6873, 6874, 6875, 6876, 6878, 6879, 6880, 6881, 6883, 6884, 6885, 6886, 6888, 6889, 6890, 6891, 6892, 6893, 6894, 6895, 6896, 6898, 6899, 6900, 6901, 6902, 6904, 6905, 6907, 6909, 6910, 6911, 6912, 6914, 6916, 6917, 6921, 6924, 6925, 6926, 6928, 6930, 6931, 6932, 6934, 6935, 6936, 6937, 6938, 6941, 6950, 6952, 6954, 6955, 6956, 6957, 6959, 6961, 6967, 6968, 6970, 6971, 6972, 6974, 6975, 6978, 6980, 6982, 6983, 6985, 6986, 6987, 6988, 6990, 6991, 6992, 6993, 6997, 6998, 7001, 7003, 7005, 7007, 7008, 7009, 7010, 7011, 7012, 7013, 7016, 7018, 7020, 7021, 7024, 7026, 7027, 7028, 7029, 7030, 7031, 7033, 7034, 7035, 7037, 7038, 7039, 7043, 7044, 7047, 7048, 7049, 7050, 7052, 7057, 7059, 7060, 7061, 7062, 7064, 7065, 7066, 7067, 7068, 7070, 7074, 7076, 7078, 7081, 7082, 7083, 7084, 7089, 7094, 7095, 7098, 7099, 7101, 7106, 7107, 7108, 7110, 7113, 7114, 7119, 7120, 7121, 7124, 7128, 7131, 7135, 7136, 7137, 7140, 7141, 7142, 7143, 7146, 7147, 7149, 7150, 7151, 7153, 7154, 7155, 7156, 7159, 7160, 7183, 7184, 7185, 7187, 7189, 7190, 7191, 7192, 7193, 7197, 7198, 7204, 7205, 7207, 7213, 7214, 7215, 7217, 7218, 7220, 7223, 7225, 7228, 7234, 7238, 7240, 7241, 7242, 7243, 7245, 7246, 7247, 7250, 7253, 7254, 7255, 7258, 7259, 7262, 7264, 7265, 7266, 7267, 7269, 7270, 7273, 7276, 7277, 7280, 7282, 7284, 7288, 7291, 7294, 7296, 7301, 7302, 7303, 7306, 7307, 7311, 7312, 7313, 7315, 7318, 7319, 7322, 7323, 7325, 7327, 7328, 7329, 7330, 7336, 7337, 7338, 7340, 7345, 7346, 7347, 7348, 7350, 7355, 7359, 7361, 7362, 7365, 7368, 7369, 7370, 7372, 7376, 7377, 7378, 7574, 7575, 7576, 7580, 7582, 7584, 7585, 7586, 7587, 7588, 7589, 7590, 7593, 7594, 7596, 7599, 7600, 7604, 7606, 7609, 7610, 7611, 7612, 7613, 7614, 7616, 7617, 7618, 7619, 7620, 7621, 7622, 7627, 7629, 7630, 7631, 7633, 7634, 7636, 7638, 7640, 7642, 7644, 7645, 7647, 7648, 7649, 7652, 7653, 7654, 7655, 7656, 7657, 7659, 7660, 7661, 7662, 7663, 7665, 7666, 7667, 7668, 7669, 7671, 7673, 7674, 7675, 7676, 7678, 7683, 7684, 7686, 7689, 7690, 7691, 7692, 7693, 7694, 7695, 7697, 7698, 7699, 7701, 7702, 7703, 7704, 7705, 7706, 7707, 7708, 7711, 7714, 7715, 7717, 7719, 7720, 7721, 7722, 7723, 7724, 7726, 7731, 7733, 7736, 7737, 7738, 7740, 7743, 7746, 7750, 7755, 7757, 7759, 7760, 7761, 7762, 7763, 7764, 7767, 7768, 7770, 7771, 7772, 7775, 7776, 7778, 7781, 7782, 7783, 7784, 7785, 7787, 7788, 7789, 7791, 7793, 7794, 7795, 7796, 7797, 7798, 7799, 7802, 7803, 7804, 7805, 7806, 7807, 7809, 7811, 7812, 7813, 7814, 7816, 7817, 7819, 7820, 7821, 7824, 7825, 7827, 7828, 7829, 7830, 7834, 7836, 7838, 7839, 7841, 7842, 7845, 7846, 7850, 7851, 7852, 7853, 7855, 7856, 7857, 7859, 7861, 7862, 7863, 7865, 7866, 7868, 7869, 7870, 7873, 7875, 7876, 7878, 7880, 7881, 7883, 7884, 7885, 7887, 7888, 7889, 7891, 7895, 7897, 7898, 7899, 7900, 7901, 7902, 7904, 7905, 7906, 7907, 7908, 7909, 7910, 7913, 7916, 7917, 7919, 7920, 7922, 7923, 7924, 7926, 7927, 7930, 7935, 7936, 7938, 7940, 7942, 7943, 7950, 7951, 7952, 7953, 7955, 7956, 7958, 7960, 7961, 7963, 7964, 7965, 7966, 7971, 7972, 7974, 7976, 7979, 7981, 7983, 7984, 7985, 7988, 7990, 7992, 7993, 7994, 7995, 7997, 8000, 8001, 8002, 8004, 8005, 8006, 8007, 8026, 8027, 8028, 8029, 8030, 8031, 8033, 8034, 8035, 8036, 8038, 8041, 8042, 8043, 8044, 8045, 8047, 8048, 8049, 8051, 8052, 8053, 8054, 8056, 8058, 8059, 8061, 8062, 8064, 8067, 8068, 8069, 8070, 8073, 8079, 8080, 8081, 8082, 8083, 8084, 8087, 8088, 8089, 8091, 8092, 8093, 8094, 8098, 8105, 8108, 8109, 8110, 8111, 8112, 8113, 8114, 8115, 8116, 8117, 8118, 8120, 8121, 8124, 8125, 8126, 8127, 8128, 8130, 8131, 8132, 8135, 8137, 8141, 8142, 8143, 8144, 8145, 8147, 8150, 8151, 8152, 8154, 8155, 8156, 8160, 8161, 8163, 8167, 8168, 8171, 8172, 8173, 8175, 8176, 8179, 8181, 8183, 8187, 8189, 8190, 8192, 8193, 8194, 8197, 8201, 8202, 8204, 8212, 8213, 8214, 8215, 8217, 8219, 8222, 8224, 8225, 8226, 8227, 8228, 8229, 8231, 8232, 8233, 8236, 8238, 8239, 8242, 8244, 8248, 8249, 8251, 8254, 8256, 8258, 8259, 8260, 8262, 8264, 8265, 8266, 8267, 8268, 8269, 8270, 8272, 8273, 8274, 8276, 8277, 8278, 8279, 8281, 8284, 8285, 8286, 8287, 8289, 8290, 8291, 8292, 8293, 8294, 8296, 8300, 8301, 8302, 8303, 8307, 8308, 8311, 8312, 8313, 8314, 8316, 8318, 8319, 8320, 8322, 8324, 8326, 8329, 8330, 8331, 8335, 8336, 8337, 8338, 8339, 8341, 8343, 8345, 8348, 8349, 8350, 8351, 8352, 8353, 8354, 8355, 8356, 8359, 8360, 8364, 8367, 8369, 8370, 8375, 8376, 8380, 8381, 8385, 8388, 8389, 8390, 8391, 8393, 8395, 8396, 8397, 8401, 8402, 8403, 8408, 8409, 8411, 8412, 8414, 8415, 8416, 8418, 8420, 8422, 8423, 8427, 8430, 8431, 8432, 8435, 8437, 8439, 8440, 8441, 8443, 8444, 8445, 8446, 8447, 8448, 8449, 8451, 8453, 8454, 8456, 8459, 8464, 8465, 8466, 8467, 8471, 8472, 8474, 8475, 8477, 8482, 8483, 8484, 8485, 8487, 8488, 8489, 8492, 8493, 8495, 8496, 8498, 8499, 8500, 8502, 8503, 8505, 8509, 8510, 8511, 8512, 8513, 8514, 8515, 8518, 8519, 8520, 8521, 8522, 8524, 8525, 8526, 8527, 8529, 8534, 8535, 8537, 8538, 8539, 8540, 8541, 8542, 8543, 8546, 8547, 8549, 8553, 8555, 8556, 8558, 8559, 8560, 8562, 8563, 8567, 8568, 8570, 8571, 8573, 8574, 8575, 8576, 8578, 8579, 8580, 8581, 8583, 8585, 8586, 8588, 8590, 8592, 8594, 8595, 8596, 8597, 8598, 8599, 8601, 8604, 8605, 8606, 8607, 8608, 8609, 8613, 8616, 8617, 8618, 8620, 8621, 8624, 8625, 8626, 8631, 8633, 8637, 8638, 8639, 8641, 8642, 8643, 8644, 8648, 8650, 8651, 8656, 8658, 8659, 8660, 8661, 8662, 8663, 8666, 8668, 8669, 8670, 8671, 8672, 8675, 8676, 8677, 8678, 8680, 8681, 8683, 8685, 8686, 8688, 8689, 8691, 8692, 8694, 8695, 8696, 8697, 8699, 8706, 8707, 8708, 8713, 8715, 8716, 8717, 8718, 8719, 8721, 8722, 8723, 8727, 8730, 8731, 8732, 8733, 8734, 8735, 8738, 8741, 8743, 8745, 8746, 8748, 8751, 8757, 8758, 8759, 8761, 8762, 8763, 8764, 8765, 8766, 8768, 8770, 8771, 8773, 8774, 8775, 8777, 8778, 8782, 8783, 8785, 8788, 8792, 8793, 8794, 8795, 8799, 8800, 8802, 8807, 8808, 8809, 8810, 8811, 8812, 8814, 8815, 8819, 8820, 8821, 8822, 8823, 8824, 8826, 8827, 8828, 8829, 8830, 8831, 8833, 8834, 8837, 8838, 8839, 8840, 8841, 8842, 8847, 8848, 8849, 8850, 8851, 8853, 8855, 8856, 8862, 8863, 8865, 8867, 8871, 8872, 8873, 8874, 8875, 8876, 8877, 8879, 8887, 8888, 8889, 8890, 8895, 8896, 8897, 8898, 8899, 8902, 8903, 8906, 8907, 8909, 8914, 8915, 8916, 8917, 8918, 8919, 8920, 8921, 8922, 8924, 8925, 8926, 8928, 8929, 8932, 8935, 8936, 8937, 8939, 8940, 8941, 8942, 8946, 8947, 8949, 8964, 8967, 8968, 8969, 8970, 8972, 8974, 8979, 8982, 8983, 8985, 8986, 8988, 8989, 8990, 8993, 8994, 8996, 8998, 8999, 9001, 9002, 9003, 9005, 9009, 9010, 9011, 9012, 9013, 9014, 9015, 9016, 9018, 9021, 9022, 9024, 9025, 9027, 9028, 9029, 9030, 9032, 9053, 9058, 9059, 9060, 9062, 9064, 9065, 9066, 9067, 9069, 9070, 9071, 9072, 9073, 9074, 9075, 9077, 9079, 9081, 9082, 9084, 9085, 9086, 9087, 9088, 9089, 9090, 9094, 9095, 9098, 9100, 9101, 9104, 9105, 9106, 9107, 9111, 9113, 9116, 9117, 9119, 9121, 9122, 9123, 9124, 9125, 9126, 9128, 9129, 9130, 9131, 9132, 9133, 9135, 9136, 9137, 9138, 9139, 9141, 9142, 9143, 9144, 9145, 9147, 9148, 9150, 9152, 9153, 9154, 9157, 9158, 9161, 9162, 9165, 9166, 9167, 9170, 9171, 9172, 9173, 9174, 9175, 9177, 9178, 9179, 9181, 9182, 9183, 9184, 9186, 9187, 9188, 9191, 9192, 9194, 9195, 9199, 9200, 9201, 9203, 9205, 9206, 9209, 9210, 9212, 9213, 9215, 9216, 9218, 9219, 9221, 9222, 9223, 9225, 9226, 9227, 9229, 9230, 9231, 9234, 9235, 9237, 9238, 9239, 9240, 9242, 9244, 9247, 9249, 9251, 9252, 9253, 9254, 9256, 9257, 9261, 9263, 9264, 9265, 9267, 9268, 9270, 9272, 9276, 9277, 9279, 9281, 9282, 9285, 9287, 9288, 9289, 9290, 9294, 9295, 9297, 9301, 9302, 9303, 9307, 9309, 9311, 9312, 9313, 9314, 9315, 9316, 9318, 9319, 9320, 9322, 9324, 9326, 9327, 9328, 9330, 9331, 9332, 9333, 9334, 9335, 9336, 9338, 9339, 9340, 9342, 9345, 9346, 9348, 9353, 9354, 9355, 9358, 9359, 9360, 9361, 9365, 9368, 9369, 9370, 9371, 9372, 9375, 9376, 9377, 9379, 9380, 9381, 9383, 9386, 9387, 9391, 9395, 9397, 9398, 9400, 9401, 9402, 9403, 9404, 9406, 9407, 9408, 9409, 9410, 9411, 9413, 9414, 9416, 9418, 9421, 9423, 9424, 9426, 9427, 9429, 9430, 9431, 9432, 9437, 9439, 9440, 9442, 9445, 9448, 9450, 9452, 9455, 9456, 9457, 9458, 9459, 9460, 9461, 9464, 9465, 9467, 9469, 9471, 9474, 9478, 9479, 9481, 9483, 9484, 9485, 9487, 9488, 9489, 9490, 9492, 9493, 9494, 9495, 9498, 9503, 9505, 9507, 9509, 9513, 9515, 9519, 9521, 9526, 9527, 9529, 9530, 9531, 9532, 9534, 9536, 9537, 9538, 9541, 9542, 9543, 9545, 9546, 9548, 9549, 9551, 9552, 9553, 9554, 9555, 9558, 9560, 9566, 9567, 9569, 9571, 9572, 9575, 9576, 9578, 9580, 9581, 9582, 9586, 9588, 9589, 9592, 9596, 9598, 9600, 9603, 9607, 9608, 9609, 9610, 9611, 9612, 9614, 9615, 9617, 9619, 9620, 9621, 9622, 9624, 9625, 9626, 9627, 9628, 9631, 9634, 9636, 9637, 9638, 9639, 9640, 9643, 9644, 9646, 9647, 9649, 9657, 9658, 9660, 9662, 9663, 9664, 9665, 9666, 9668, 9669, 9671, 9673, 9674, 9675, 9676, 9677, 9678, 9681, 9685, 9688, 9691, 9692, 9693, 9694, 9695, 9696, 9697, 9700, 9701, 9702, 9703, 9706, 9707, 9710, 9711, 9712, 9715, 9717, 9718, 9721, 9722, 9725, 9730, 9732, 9733, 9735, 9738, 9739, 9740, 9741, 9742, 9743, 9744, 9745, 9746, 9750, and 9751.

[0101] A biologically active substance preferably comprises the amino acid sequence of any of SEQ ID NOs: 4877-9751; or fragments thereof that have biological activity. In a more preferred aspect, a biologically active substance comprises the amino acid sequence of any of SEQ ID NOs: 4877-9751. In another preferred aspect, a biologically active substance comprises the mature polypeptide region of any of SEQ ID NOs: 4877-9751, or fragments thereof that have biological activity. In another preferred aspect, a biologically active substance comprises the mature polypeptide region of any of SEQ ID NOs: 4877-9751. In another preferred aspect, a biologically active substance consists of the amino acid sequence of any of SEQ ID NOs: 4877-9751; or fragments thereof that have biological activity. In another preferred aspect, a biologically active substance consists of the amino acid sequence of any of SEQ ID NOs: 4877-9751. In another preferred aspect, a biologically active substance consists of the mature polypeptide region of any of SEQ ID NOs: 4877-9751; or fragments thereof that have biological activity. In another preferred aspect, a biologically active substance consists of the mature polypeptide region of any of SEQ ID NOs: 4877-9751.

[0102] In a second aspect, the present invention relates to a biologically active substance encoded by a polynucleotide comprising a nucleotide sequence having preferably at least 60% identity, more preferably at least 65% identity, more preferably at least 70% identity, more preferably at least 75% identity, more preferably at least 80% identity, more preferably at least 85% identity, more preferably at least 90% identity, even more preferably at least 90% identity, most preferably at least 95% identity, and even most preferably at least 97% identity with a polynucleotide selected from the group consisting of SEQ ID NOs: 2-4876 and subsequences thereof encoding fragments having biological activity.

[0103] In preferred aspect, the biologically active substance is encoded by a polynucleotide comprising a nucleotide sequence having preferably at least 60% identity, more preferably at least 65% identity, more preferably at least 70% identity, more preferably at least 75% identity, more preferably at least 80% identity, more preferably at least 85% identity, even more preferably at least 90% identity, most preferably at least 95% identity, and even most preferably at least 97% identity with a polynucleotide selected from the group consisting of SEQ ID NOs: 50, 55, 77, 82, 91, 98, 103, 110, 125, 169, 171, 172, 174, 176, 177, 178, 179, 180, 181, 182, 183, 185, 186, 187, 189, 192, 194, 195, 196, 198, 199, 201, 203, 204, 205, 206, 207, 208, 209, 210, 211, 212, 213, 214, 215, 216, 217, 218, 219, 220, 221, 222, 223, 225, 226, 227, 228, 229, 230, 240, 241, 242, 243, 244, 245, 246, 247, 248, 249, 250, 251, 252, 253, 254, 255, 256, 257, 258, 259, 260, 261, 262, 263, 264, 265, 266, 287, 306, 308, 322, 323, 329, 350, 354, 360, 363, 367, 381, 445, 469, 487, 488, 516, 523, 524, 537, 541, 575, 592, 607, 621, 627, 628, 666, 672, 688, 691, 702, 710, 719, 726, 729, 748, 751, 773, 774, 777, 791, 831, 833, 842, 847, 848, 849, 850, 851, 855, 857, 885, 886, 887, 901, 944, 982, 991, 994, 1018, 1032, 1034, 1058, 1078, 1088, 1098, 1108, 1112, 1128, 1148, 1153, 1154, 1158, 1160, 1164, 1175, 1176, 1177, 1180, 1181, 1183, 1184, 1193, 1194, 1199, 1222, 1237, 1244, 1262, 1263, 1265, 1266, 1278, 1302, 1313, 1314, 1315, 1316, 1317, 1318, 1345, 1355, 1373, 1374, 1401, 1424, 1432, 1433, 1440, 1442, 1448, 1455, 1470, 1496, 1497, 1501, 1509, 1527, 1539, 1556, 1565, 1589, 1619, 1629, 1630, 1634, 1635, 1636, 1638, 1639, 1640, 1641, 1642, 1643, 1644, 1645, 1646, 1647, 1649, 1650, 1651, 1652, 1653, 1654, 1655, 1657, 1658, 1659, 1660, 1661, 1662, 1663, 1664, 1665, 1666, 1667, 1668, 1669, 1670, 1671, 1672, 1673, 1675, 1676, 1677, 1679, 1684, 1688, 1692, 1694, 1703, 1704, 1728, 1732, 1734, 1736, 1775, 1783, 1816, 1831, 1838, 1851, 1853, 1866, 1887, 2002, 2007, 2022, 2038, 2044, 2067, 2070, 2072, 2076, 2094, 2106, 2119, 2120, 2121, 2124, 2131, 2139, 2147, 2148, 2166, 2171, 2194, 2196, 2198, 2205, 2211, 2213, 2216, 2221, 2230, 2236, 2240, 2241, 2255, 2258, 2263, 2273, 2277, 2286, 2288, 2289, 2290, 2291, 2292, 2293, 2294, 2295, 2296, 2297, 2298, 2299, 2300, 2301, 2302, 2303, 2304, 2305, 2324, 2327, 2337, 2341, 2347, 2351, 2364, 2381, 2388, 2400, 2403, 2408, 2410, 2411, 2414, 2415, 2424, 2425, 2430, 2435, 2439, 2457, 2467, 2468, 2469, 2483, 2491, 2498, 2504, 2505, 2506, 2507, 2508, 2509, 2510, 2511, 2512, 2514, 2515, 2516, 2517, 2518, 2519, 2520, 2521, 2522, 2524, 2525, 2526, 2527, 2528, 2529, 2530, 2531, 2532, 2533, 2534, 2535, 2536, 2537, 2538, 2539, 2540, 2541, 2542, 2543, 2544, 2545, 2546, 2547, 2548, 2549, 2550, 2551, 2552, 2553, 2554, 2555, 2556, 2557, 2558, 2559, 2560, 2561, 2562, 2564, 2565, 2566, 2567, 2568, 2569, 2570, 2571, 2572, 2573, 2574, 2575, 2576, 2577, 2578, 2579, 2580, 2581, 2582, 2583, 2584, 2585, 2586, 2587, 2588, 2590, 2591, 2592, 2593, 2594, 2595, 2596, 2597, 2598, 2599, 2600, 2601, 2602, 2603, 2604, 2605, 2606, 2607, 2608, 2609, 2610, 2611, 2612, 2613, 2614, 2615, 2616, 2617, 2618, 2619, 2620, 2621, 2622, 2623, 2624, 2625, 2626, 2627, 2628, 2629, 2630, 2631, 2632, 2633, 2634, 2635, 2636, 2637, 2638, 2639, 2640, 2641, 2642, 2643, 2644, 2645, 2646, 2647, 2648, 2649, 2650, 2651, 2652, 2653, 2654, 2655, 2656, 2657, 2658, 2659, 2661, 2664, 2665, 2666, 2667, 2669, 2670, 2671, 2672, 2673, 2674, 2675, 2676, 2677, 2679, 2680, 2681, 2684, 2685, 2686, 2688, 2689, 2690, 2691, 2692, 2693, 2696, 2697, 2698, 2706, 2723, 2730, 2733, 2751, 2762, 2795, 2806, 2813, 2834, 2835, 2841, 2850, 2866, 2867, 2874, 2878, 2898, 2902, 2904, 2917, 2947, 2957, 2960, 2969, 2972, 2973, 2999, 3004, 3019, 3028, 3054, 3064, 3082, 3093, 3123, 3133, 3134, 3135, 3136, 3137, 3138, 3139, 3140, 3141, 3142, 3143, 3144, 3145, 3146, 3147, 3148, 3149, 3150, 3162, 3222, 3224, 3225, 3226, 3227, 3228, 3229, 3231, 3244, 3248, 3259, 3264, 3265, 3287, 3291, 3303, 3310, 3311, 3321, 3324, 3355, 3362, 3371, 3429, 3434, 3442, 3446, 3458, 3471, 3486, 3496, 3499, 3503, 3504, 3508, 3549, 3558, 3577, 3593, 3598, 3601, 3603, 3606, 3611, 3642, 3653, 3655, 3670, 3673, 3682, 3690, 3694, 3707, 3716, 3727, 3736, 3737, 3744, 3753, 3765, 3790, 3798, 3799, 3872, 3881, 3885, 3915, 3916, 3922, 3931, 3938, 3969, 4011, 4017, 4056, 4059, 4068, 4076, 4077, 4081, 4082, 4085, 4090, 4106, 4112, 4117, 4144, 4145, 4158, 4159, 4160, 4161, 4162, 4163, 4164, 4165, 4166, 4167, 4168, 4169, 4170, 4171, 4172, 4173, 4174, 4175, 4176, 4179, 4181, 4182, 4201, 4235, 4285, 4288, 4305, 4323, 4333, 4336, 4353, 4398, 4409, 4417, 4421, 4423, 4429, 4435, 4448, 4450, 4469, 4472, 4476, 4482, 4488, 4513, 4518, 4544, 4559, 4560, 4569, 4571, 4578, 4607, 4622, 4631, 4643, 4647, 4648, 4650, 4658, 4669, 4672, 4682, 4687, 4688, 4704, 4718, 4754, 4767, 4786, 4792, 4797, 4804, 4812, 4814, 4823, 4830, 4833, 4838, 4848, 4849, 4859, 4862, and 4872; preferably at least 75% identity, more preferably at least 80% identity, more preferably at least 85% identity, even more preferably at least 90% identity, most preferably at least 95% identity, and even most preferably at least 97% identity with a polynucleotide selected from the group consisting of SEQ ID NOs: 909, 911, 1367, 1498, 2663, 2668, 2682, and 2683; preferably at least 80% identity, more preferably at least 85% identity, even more preferably at least 90% identity, most preferably at least 95% identity, and even most preferably at least 97% identity with a polynucleotide selected from the group consisting of SEQ ID NOs: 167, 654, 2513, 2589, and 2694; preferably at least 85% identity, more preferably at least 90% identity, most preferably at least 95% identity, and even most preferably at least 97% identity with a polynucleotide selected from the group consisting of SEQ ID NOs: 163, 184, 910, 1674, 2412, 2660, 2662, 2695, and 3231; preferably at least 90% identity, more preferably at least 95% identity, and most preferably at least 97% identity with a polynucleotide selected from the group consisting of SEQ ID NOs: 27, 166, 168, 170, 193, 202, 231, 543, 776, 888, 889, 890, 898, 908, 916, 1028, 1123, 1133, 1155, 1156, 1157, 1173, 1211, 1212, 1218, 1229, 1230, 1277, 1356, 1357, 1359, 1360, 1368, 1372, 1391, 1500, 1584, 1604, 1627, 1631, 1632, 1637, 1648, 1680, 2101, 2102, 2239, 2358, 2359, 2360, 2404, 2417, 2429, 2494, 2563, 2678, 2724, 3111, 3539, 3850, 4078, 4079, 4080, 4083, 4084, 4180, 4221, 4642, 4689, 4707, and 4727; or preferably at least 95% identity and more preferably at least 97% identity with a polynucleotide selected from the group consisting of SEQ ID NOs: 2, 3, 4, 5, 6, 7, 8, 9, 10, 11, 12, 13, 14, 15, 16, 17, 18, 19, 20, 21, 22, 23, 24, 25, 26, 28, 29, 30, 31, 32, 33, 34, 35, 36, 37, 38, 39, 40, 41, 42, 43, 44, 45, 46, 47, 48, 49, 51, 52, 53, 54, 56, 57, 58, 59, 60, 61, 62, 63, 64, 65, 66, 67, 68, 69, 70, 71, 72, 73, 74, 75, 76, 78, 79, 80, 81, 83, 84, 85, 86, 87, 88, 89, 90, 92, 93, 94, 95, 96, 97, 99, 100, 101, 102, 104, 105, 106, 107, 108, 109, 111, 112, 113, 114, 115, 116, 117, 118, 119, 120, 121, 122, 123, 124, 126, 127, 128, 129, 130, 131, 132, 133, 134, 135, 136, 137, 138, 139, 140, 141, 142, 143, 144, 145, 146, 147, 148, 149, 150, 151, 152, 153, 154, 155, 156, 157, 158, 159, 160, 161, 162, 164, 165, 173, 175, 188, 190, 191, 197, 200, 224, 232, 233, 234, 235, 236, 237, 238, 239, 267, 268, 269, 270, 271, 272, 273, 274, 275, 276, 277, 278, 279, 280, 281, 282, 283, 284, 285, 286, 288, 289, 290, 291, 292, 293, 294, 295, 296, 297, 298, 299, 300, 301, 302, 303, 304, 305, 307, 309, 310, 311, 312, 313, 314, 315, 316, 317, 318, 319, 320, 321, 324, 325, 326, 327, 328, 330, 331, 332, 333, 334, 335, 336, 337, 338, 339, 340, 341, 342, 343, 344, 345, 346, 347, 348, 349, 351, 352, 353, 355, 356, 357, 358, 359, 361, 362, 364, 365, 366, 368, 369, 370, 371, 372, 373, 374, 375, 376, 377, 378, 379, 380, 382, 383, 384, 385, 386, 387, 388, 389, 390, 391, 392, 393, 394, 395, 396, 397, 398, 399, 400, 401, 402, 403, 404, 405, 406, 407, 408, 409, 410, 411, 412, 413, 414, 415, 416, 417, 418, 419, 420, 421, 422, 423, 424, 425, 426, 427, 428, 429, 430, 431, 432, 433, 434, 435, 436, 437, 438, 439, 440, 441, 442, 443, 444, 446, 447, 448, 449, 450, 451, 452, 453, 454, 455, 456, 457, 458, 459, 460, 461, 462, 463, 464, 465, 466, 467, 468, 470, 471, 472, 473, 474, 475, 476, 477, 478, 479, 480, 481, 482, 483, 484, 485, 486, 489, 490, 491, 492, 493, 494, 495, 496, 497, 498, 499, 500, 501, 502, 503, 504, 505, 506, 507, 508, 509, 510, 511, 512, 513, 514, 515, 517, 518, 519, 520, 521, 522, 525, 526, 527, 528, 529, 530, 531, 532, 533, 534, 535, 536, 538, 539, 540, 542, 544, 545, 546, 547, 548, 549, 550, 551, 552, 553, 554, 555, 556, 557, 558, 559, 560, 561, 562, 563, 564, 565, 566, 567, 568, 569, 570, 571, 572, 573, 574, 576, 577, 578, 579, 580, 581, 582, 583, 584, 585, 586, 587, 588, 589, 590, 591, 593, 594, 595, 596, 597, 598, 599, 600, 601, 602, 603, 604, 605, 606, 608, 609, 610, 611, 612, 613, 614, 615, 616, 617, 618, 619, 620, 622, 623, 624, 625, 626, 629, 630, 631, 632, 633, 634, 635, 636, 637, 638, 639, 640, 641, 642, 643, 644, 645, 646, 647, 648, 649, 650, 651, 652, 653, 655, 656, 657, 658, 659, 660, 661, 662, 663, 664, 665, 667, 668, 669, 670, 671, 673, 674, 675, 676, 677, 678, 679, 680, 681, 682, 683, 684, 685, 686, 687, 689, 690, 692, 693, 694, 695, 696, 697, 698, 699, 700, 701, 703, 704, 705, 706, 707, 708, 709, 711, 712, 713, 714, 715, 716, 717, 718, 720, 721, 722, 723, 724, 725, 727, 728, 730, 731, 732, 733, 734, 735, 736, 737, 738, 739, 740, 741, 742, 743, 744, 745, 746, 747, 749, 750, 752, 753, 754, 755, 756, 757, 758, 759, 760, 761, 762, 763, 764, 765, 766, 767, 768, 769, 770, 771, 772, 775, 778, 779, 780, 781, 782, 783, 784, 785, 786, 787, 788, 789, 790, 792, 793, 794, 795, 796, 797, 798, 799, 800, 801, 802, 803, 804, 805, 806, 807, 808, 809, 810, 811, 812, 813, 814, 815, 816, 817, 818, 819, 820, 821, 822, 823, 824, 825, 826, 827, 828, 829, 830, 832, 834, 835, 836, 837, 838, 839, 840, 841, 843, 844, 845, 846, 852, 853, 854, 856, 858, 859, 860, 861, 862, 863, 864, 865, 866, 867, 868, 869, 870, 871, 872, 873, 874, 875, 876, 877, 878, 879, 880, 881, 882, 883, 884, 891, 892, 893, 894, 895, 896, 897, 899, 900, 902, 903, 904, 905, 906, 907, 912, 913, 914, 915, 917, 918, 919, 920, 921, 922, 923, 924, 925, 926, 927, 928, 929, 930, 931, 932, 933, 934, 935, 936, 937, 938, 939, 940, 941, 942, 943, 945, 946, 947, 948, 949, 950, 951, 952, 953, 954, 955, 956, 957, 958, 959, 960, 961, 962, 963, 964, 965, 966, 967, 968, 969, 970, 971, 972, 973, 974, 975, 976, 977, 978, 979, 980, 981, 983, 984, 985, 986, 987, 988, 989, 990, 992, 993, 995, 996, 997, 998, 999, 1000, 1001, 1002, 1003, 1004, 1005, 1006, 1007, 1008, 1009, 1010, 1011, 1012, 1013, 1014, 1015, 1016, 1017, 1019, 1020, 1021, 1022, 1023, 1024, 1025, 1026, 1027, 1029, 1030, 1031, 1033, 1035, 1036, 1037, 1038, 1039, 1040, 1041, 1042, 1043, 1044, 1045, 1046, 1047, 1048, 1049, 1050, 1051, 1052, 1053, 1054, 1055, 1056, 1057, 1059, 1060, 1061, 1062, 1063, 1064, 1065, 1066, 1067, 1068, 1069, 1070, 1071, 1072, 1073, 1074, 1075, 1076, 1077, 1079, 1080, 1081, 1082, 1083, 1084, 1085, 1086, 1087, 1089, 1090, 1091, 1092, 1093, 1094, 1095, 1096, 1097, 1099, 1100, 1101, 1102, 1103, 1104, 1105, 1106, 1107, 1109, 1110, 1111, 1113, 1114, 1115, 1116, 1117, 1118, 1119, 1120, 1121, 1122, 1124, 1125, 1126, 1127, 1129, 1130, 1131, 1132, 1134, 1135, 1136, 1137, 1138, 1139, 1140, 1141, 1142, 1143, 1144, 1145, 1146, 1147, 1149, 1150, 1151, 1152, 1159, 1161, 1162, 1163, 1165, 1166, 1167, 1168, 1169, 1170, 1171, 1172, 1174, 1178, 1179, 1182, 1185, 1186, 1187, 1188, 1189, 1190, 1191, 1192, 1195, 1196, 1197, 1198, 1200, 1201, 1202, 1203, 1204, 1205, 1206, 1207, 1208, 1209, 1210, 1213, 1214, 1215, 1216, 1217, 1219, 1220, 1221, 1223, 1224, 1225, 1226, 1227, 1228, 1231, 1232, 1233, 1234, 1235, 1236, 1238, 1239, 1240, 1241, 1242, 1243, 1245, 1246, 1247, 1248, 1249, 1250, 1251, 1252, 1253, 1254, 1255, 1256, 1257, 1258, 1259, 1260, 1261, 1264, 1267, 1268, 1269, 1270, 1271, 1272, 1273, 1274, 1275, 1276, 1279, 1280, 1281, 1282, 1283, 1284, 1285, 1286, 1287, 1288, 1289, 1290, 1291, 1292, 1293, 1294, 1295, 1296, 1297, 1298, 1299, 1300, 1301, 1303, 1304, 1305, 1306, 1307, 1308, 1309, 1310, 1311, 1312, 1319, 1320, 1321, 1322, 1323, 1324, 1325, 1326, 1327, 1328, 1329, 1330, 1331, 1332, 1333, 1334, 1335, 1336, 1337, 1338, 1339, 1340, 1341, 1342, 1343, 1344, 1346, 1347, 1348, 1349, 1350, 1351, 1352, 1353, 1354, 1358, 1361, 1362, 1363, 1364, 1365, 1366, 1369, 1370, 1371, 1375, 1376, 1377, 1378, 1379, 1380, 1381, 1382, 1383, 1384, 1385; 1386, 1387, 1388, 1389, 1390, 1392, 1393, 1394, 1395, 1396, 1397, 1398, 1399, 1400, 1402, 1403, 1404, 1405, 1406, 1407, 1408, 1409, 1410, 1411, 1412, 1413, 1414, 1415, 1416, 1417, 1418, 1419, 1420, 1421, 1422, 1423, 1425, 1426, 1427, 1428, 1429, 1430, 1431, 1434, 1435, 1436, 1437, 1438, 1439, 1441, 1443, 1444, 1445, 1446, 1447, 1449, 1450, 1451, 1452, 1453, 1454, 1456, 1457, 1458, 1459, 1460, 1461, 1462, 1463, 1464, 1465, 1466, 1467, 1468, 1469, 1471, 1472, 1473, 1474, 1475, 1476, 1477, 1478, 1479, 1480, 1481, 1482, 1483, 1484, 1485, 1486, 1487, 1488, 1489, 1490, 1491, 1492, 1493, 1494, 1495, 1499, 1502, 1503, 1504, 1505, 1506, 1507, 1508, 1510, 1511, 1512, 1513, 1514, 1515, 1516, 1517, 1518, 1519, 1520, 1521, 1522, 1523, 1524, 1525, 1526, 1528, 1529, 1530, 1531, 1532, 1533, 1534, 1535, 1536, 1537, 1538, 1540, 1541, 1542, 1543, 1544, 1545, 1546, 1547, 1548, 1549, 1550, 1551, 1552, 1553, 1554, 1555, 1557, 1558, 1559, 1560, 1561, 1562, 1563, 1564, 1566, 1567, 1568, 1569, 1570, 1571, 1572, 1573, 1574, 1575, 1576, 1577, 1578, 1579, 1580, 1581, 1582, 1583, 1585, 1586, 1587, 1588, 1590, 1591, 1592, 1593, 1594, 1595, 1596, 1597, 1598, 1599, 1600, 1601, 1602, 1603, 1605, 1606, 1607, 1608, 1609, 1610, 1611, 1612, 1613, 1614, 1615, 1616, 1617, 1618, 1620, 1621, 1622, 1623, 1624, 1625, 1626, 1628, 1633, 1656, 1678, 1681, 1682, 1683, 1685, 1686, 1687, 1689, 1690, 1691, 1693, 1695, 1696, 1697, 1698, 1699, 1700, 1701, 1702, 1705, 1706, 1707, 1708, 1709, 1710, 1711, 1712, 1713, 1714, 1715, 1716, 1717, 1718, 1719, 1720, 1721, 1722, 1723, 1724, 1725, 1726, 1727, 1729, 1730, 1731, 1733, 1735, 1737, 1738, 1739, 1740, 1741, 1742, 1743, 1744, 1745, 1746, 1747, 1748, 1749, 1750, 1751, 1752, 1753, 1754, 1755, 1756, 1757, 1758, 1759, 1760, 1761, 1762, 1763, 1764, 1765, 1766, 1767, 1768, 1769, 1770, 1771, 1772, 1773, 1774, 1776, 1777, 1778, 1779, 1780, 1781, 1782, 1784, 1785, 1786, 1787, 1788, 1789, 1790, 1791, 1792, 1793, 1794, 1795, 1796, 1797, 1798, 1799, 1800, 1801, 1802, 1803, 1804, 1805, 1806, 1807, 1808, 1809, 1810, 1811, 1812, 1813, 1814, 1815, 1817, 1818, 1819, 1820, 1821, 1822, 1823, 1824, 1825, 1826, 1827, 1828, 1829, 1830, 1832, 1833, 1834, 1835, 1836, 1837, 1839, 1840, 1841, 1842, 1843, 1844, 1845, 1846, 1847, 1848, 1849, 1850, 1852, 1854, 1855, 1856, 1857, 1858, 1859, 1860, 1861, 1862, 1863, 1864, 1865, 1867, 1868, 1869, 1870, 1871, 1872, 1873, 1874, 1875, 1876, 1877, 1878, 1879, 1880, 1881, 1882, 1883, 1884, 1885, 1886, 1888, 1889, 1890, 1891, 1892, 1893, 1894, 1895, 1896, 1897, 1898, 1899, 1900, 1901, 1902, 1903, 1904, 1905, 1906, 1907, 1908, 1909, 1910, 1911, 1912, 1913, 1914, 1915, 1916, 1917, 1918, 1919, 1920, 1921, 1922, 1923, 1924, 1925, 1926, 1927, 1928, 1929, 1930, 1931, 1932, 1933, 1934, 1935, 1936, 1937, 1938, 1939, 1940, 1941, 1942, 1943, 1944, 1945, 1946, 1947, 1948, 1949, 1950, 1951, 1952, 1953, 1954, 1955, 1956, 1957, 1958, 1959, 1960, 1961, 1962, 1963, 1964, 1965, 1966, 1967, 1968, 1969, 1970, 1971, 1972, 1973, 1974, 1975, 1976, 1977, 1978, 1979, 1980, 1981, 1982, 1983, 1984, 1985, 1986, 1987, 1988, 1989, 1990, 1991, 1992, 1993, 1994, 1995, 1996, 1997, 1998, 1999, 2000, 2001, 2003, 2004, 2005, 2006, 2008, 2009, 2010, 2011, 2012, 2013, 2014, 2015, 2016, 2017, 2018, 2019, 2020, 2021, 2023, 2024, 2025, 2026, 2027, 2028, 2029, 2030, 2031, 2032, 2033, 2034, 2035, 2036, 2037, 2039, 2040, 2041, 2042, 2043, 2045, 2046, 2047, 2048, 2049, 2050, 2051, 2052, 2053, 2054, 2055, 2056, 2057, 2058, 2059, 2060, 2061, 2062, 2063, 2064, 2065, 2066, 2068, 2069, 2071, 2073, 2074, 2075, 2077, 2078, 2079, 2080, 2081, 2082, 2083, 2084, 2085, 2086, 2087, 2088, 2089, 2090, 2091, 2092, 2093, 2095, 2096, 2097, 2098, 2099, 2100, 2103, 2104, 2105, 2107, 2108, 2109, 2110, 2111, 2112, 2113, 2114, 2115, 2116, 2117, 2118, 2122, 2123, 2125, 2126, 2127, 2128, 2129, 2130, 2132, 2133, 2134, 2135, 2136, 2137, 2138, 2140, 2141, 2142, 2143, 2144, 2145, 2146, 2149, 2150, 2151, 2152, 2153, 2154, 2155, 2156, 2157, 2158, 2159, 2160, 2161, 2162, 2163, 2164, 2165, 2167, 2168, 2169, 2170, 2172, 2173, 2174, 2175, 2176, 2177, 2178, 2179, 2180, 2181, 2182, 2183, 2184, 2185, 2186, 2187, 2188, 2189, 2190, 2191, 2192, 2193, 2195, 2197, 2199, 2200, 2201, 2202, 2203, 2204, 2206, 2207, 2208, 2209, 2210, 2212, 2214, 2215, 2217, 2218, 2219, 2220, 2222, 2223, 2224, 2225, 2226, 2227, 2228, 2229, 2231, 2232, 2233, 2234, 2235, 2237, 2238, 2242, 2243, 2244, 2245, 2246, 2247, 2248, 2249, 2250, 2251, 2252, 2253, 2254, 2256, 2257, 2259, 2260, 2261, 2262, 2264, 2265, 2266, 2267, 2268, 2269, 2270, 2271, 2272, 2274, 2275, 2276, 2278, 2279, 2280, 2281, 2282, 2283, 2284, 2285, 2287, 2306, 2307, 2308, 2309, 2310, 2311, 2312, 2313, 2314, 3231, 2316, 2317, 2318, 2319, 2320, 2321, 2322, 2323, 2325, 2326, 2328, 2329, 2330, 2331, 2332, 2333, 2334, 2335, 2336, 2338, 2339, 2340, 2342, 2343, 2344, 2345, 2346, 2348, 2349, 2350, 2352, 2353, 2354, 2355, 2356, 2357, 2361, 2362, 2363, 2365, 2366, 2367, 2368, 2369, 2370, 2371, 2372, 2373, 2374, 2375, 2376, 2377, 2378, 2379, 2380, 2382, 2383, 2384, 2385, 2386, 2387, 2389, 2390, 2391, 2392, 2393, 2394, 2395, 2396, 2397, 2398, 2399, 2401, 2402, 2405, 2406, 2407, 2409, 2413, 2416, 2418, 2419, 2420, 2421, 2422, 2423, 2426, 2427, 2428, 2431, 2432, 2433, 2434, 2436, 2437, 2438, 2440, 2441, 2442, 2443, 2444, 2445, 2446, 2447, 2448, 2449, 2450, 2451, 2452, 2453, 2454, 2455, 2456, 2458, 2459, 2460, 2461, 2462, 2463, 2464, 2465, 2466, 2470, 2471, 2472, 2473, 2474, 2475, 2476, 2477, 2478, 2479, 2480, 2481, 2482, 2484, 2485, 2486, 2487, 2488, 2489, 2490, 2492, 2493, 2495, 2496, 2497, 2499, 2500, 2501, 2502, 2503, 2523, 2687, 3231, 2700, 2701, 2702, 2703, 2704, 2705, 2707, 2708, 2709, 2710, 2711, 2712, 2713, 2714, 2715, 2716, 2717, 2718, 2719, 2720, 2721, 2722, 2725, 2726, 2727, 2728, 2729, 2731, 2732, 2734, 2735, 2736, 2737, 2738, 2739, 2740, 2741, 2742, 2743, 2744, 2745, 2746, 2747, 2748, 2749, 2750, 2752, 2753, 2754, 2755, 2756, 2757, 2758, 2759, 2760, 2761, 2763, 2764, 2765, 2766, 2767, 2768, 2769, 2770, 2771, 2772, 2773, 2774, 2775, 2776, 2777, 2778, 2779, 2780, 2781, 2782, 2783, 2784, 2785, 2786, 2787, 2788, 2789, 2790, 2791, 2792, 2793, 2794, 2796, 2797, 2798, 2799, 2800, 2801, 2802, 2803, 2804, 2805, 2807, 2808, 2809, 2810, 2811, 2812, 2814, 2815, 2816, 2817, 2818, 2819, 2820, 2821, 2822, 2823, 2824, 2825, 2826, 2827, 2828, 2829, 2830, 2831, 2832, 2833, 2836, 2837, 2838, 2839, 2840, 2842, 2843, 2844, 2845, 2846, 2847, 2848, 2849, 2851, 2852, 2853, 2854, 2855, 2856, 2857, 2858, 2859, 2860, 2861, 2862, 2863, 2864, 2865, 2868, 2869, 2870, 2871, 2872, 2873, 2875, 2876, 2877, 2879, 2880, 2881, 2882, 2883, 2884, 2885, 2886, 2887, 2888, 2889, 2890, 2891, 2892, 2893, 2894, 2895, 2896, 2897, 2899, 2900, 2901, 2903, 2905, 2906, 2907, 2908, 2909, 2910, 2911, 2912, 2913, 2914, 2915, 2916, 2918, 2919, 2920, 2921, 2922, 2923, 2924, 2925, 2926, 2927, 2928, 2929, 2930, 2931, 2932, 2933, 2934, 2935, 2936, 2937, 2938, 2939, 2940, 2941, 2942, 2943, 2944, 2945, 2946, 2948, 2949, 2950, 2951, 2952, 2953, 2954, 2955, 2956, 2958, 2959, 2961, 2962, 2963, 2964, 2965, 2966, 2967, 2968, 2970, 2971, 2974, 2975, 2976, 2977, 2978, 2979, 2980, 2981, 2982, 2983, 2984, 2985, 2986, 2987, 2988, 2989, 2990, 2991, 2992, 2993, 2994, 2995, 2996, 2997, 2998, 3000, 3001, 3002, 3003, 3005, 3006, 3007, 3008, 3009, 3010, 3011, 3012, 3013, 3014, 3015, 3016, 3017, 3018, 3020, 3021, 3022, 3023, 3024, 3025, 3026, 3027, 3029, 3030, 3031, 3032, 3033, 3034, 3035, 3036, 3037, 3038, 3039, 3040, 3041, 3042, 3043, 3044, 3045, 3046, 3047, 3048, 3049, 3050, 3051, 3052, 3053, 3055, 3056, 3057, 3058, 3059, 3060, 3061, 3062, 3063, 3065, 3066, 3067, 3068, 3069, 3070, 3071, 3072, 3073, 3074, 3075, 3076, 3077, 3078, 3079, 3080, 3081, 3083, 3084, 3085, 3086, 3087, 3088, 3089, 3090, 3091, 3092, 3094, 3095, 3096, 3097, 3098, 3099, 3100, 3101, 3102, 3103, 3104, 3105, 3106, 3107, 3108, 3109, 3110, 3112, 3113, 3114, 3115, 3116, 3117, 3118, 3119, 3120, 3121, 3122, 3124, 3125, 3126, 3127, 3128, 3129, 3130, 3131, 3132, 3151, 3152, 3153, 3154, 3155, 3156, 3157, 3158, 3159, 3160, 3161, 3163, 3164, 3165, 3166, 3167, 3168, 3169, 3170, 3171, 3172, 3173, 3174, 3175, 3176, 3177, 3178, 3179, 3180, 3181, 3182, 3183, 3184, 3185, 3186, 3187, 3188, 3189, 3190, 3191, 3192, 3193, 3194, 3195, 3196, 3197, 3198, 3199, 3200, 3201, 3202, 3203, 3204, 3205, 3206, 3207, 3208, 3209, 3210, 3211, 3212, 3213, 3214, 3215, 3216, 3217, 3218, 3219, 3220, 3221, 3223, 3232, 3233, 3234, 3235, 3236, 3237, 3238, 3239, 3240, 3241, 3242, 3243, 3245, 3246, 3247, 3249, 3250, 3251, 3252, 3253, 3254, 3255, 3256, 3257, 3258, 3260, 3261, 3262, 3263, 3266, 3267, 3268, 3269, 3270, 3271, 3272, 3273, 3274, 3275, 3276, 3277, 3278, 3279, 3280, 3281, 3282, 3283, 3284, 3285, 3286, 3288, 3289, 3290, 3292, 3293, 3294, 3295, 3296, 3297, 3298, 3299, 3300, 3301, 3302, 3304, 3305, 3306, 3307, 3308, 3309, 3312, 3313, 3314, 3315, 3316, 3317, 3318, 3319, 3320, 3322, 3323, 3325, 3326, 3327, 3328, 3329, 3330, 3331, 3332, 3333, 3334, 3335, 3336, 3337, 3338, 3339, 3340, 3341, 3342, 3343, 3344, 3345, 3346, 3347, 3348, 3349, 3350, 3351, 3352, 3353, 3354, 3356, 3357, 3358, 3359, 3360, 3361, 3363, 3364, 3365, 3366, 3367, 3368, 3369, 3370, 3372, 3373, 3374, 3375, 3376, 3377, 3378, 3379, 3380, 3381, 3382, 3383, 3384, 3385, 3386, 3387, 3388, 3389, 3390, 3391, 3392, 3393, 3394, 3395, 3396, 3397, 3398, 3399, 3400, 3401, 3402, 3403, 3404, 3405, 3406, 3407, 3408, 3409, 3410, 3411, 3412, 3413, 3414, 3415, 3416, 3417, 3418, 3419, 3420, 3421, 3422, 3423, 3424, 3425, 3426, 3427, 3428, 3430, 3431, 3432, 3433, 3435, 3436, 3437, 3438, 3439, 3440, 3441, 3443, 3444, 3445, 3447, 3448, 3449, 3450, 3451, 3452, 3453, 3454, 3455, 3456, 3457, 3459, 3460, 3461, 3462, 3463, 3464, 3465, 3466, 3467, 3468, 3469, 3470, 3472, 3473, 3474, 3475, 3476, 3477, 3478, 3479, 3480, 3481, 3482, 3483, 3484, 3485, 3487, 3488, 3489, 3490, 3491, 3492, 3493, 3494, 3495, 3497, 3498, 3500, 3501, 3502, 3505, 3506, 3507, 3509, 3510, 3511, 3512, 3513, 3514, 3515, 3516, 3517, 3518, 3519, 3520, 3521, 3522, 3523, 3524, 3525, 3526, 3527, 3528, 3529, 3530, 3531, 3532, 3533, 3534, 3535, 3536, 3537, 3538, 3540, 3541, 3542, 3543, 3544, 3545, 3546, 3547, 3548, 3550, 3551, 3552, 3553, 3554, 3555, 3556, 3557, 3559, 3560, 3561, 3562, 3563, 3564, 3565, 3566, 3567, 3568, 3569, 3570, 3571, 3572, 3573, 3574, 3575, 3576, 3578, 3579, 3580, 3581, 3582, 3583, 3584, 3585, 3586, 3587, 3588, 3589, 3590, 3591, 3592, 3594, 3595, 3596, 3597, 3599, 3600, 3602, 3604, 3605, 3607, 3608, 3609, 3610, 3612, 3613, 3614, 3615, 3616, 3617, 3618, 3619, 3620, 3621, 3622, 3623, 3624, 3625, 3626, 3627, 3628, 3629, 3630, 3631, 3632, 3633, 3634, 3635, 3636, 3637, 3638, 3639, 3640, 3641, 3643, 3644, 3645, 3646, 3647, 3648, 3649, 3650, 3651, 3652, 3654, 3656, 3657, 3658, 3659, 3660, 3661, 3662, 3663, 3664, 3665, 3666, 3667, 3668, 3669, 3671, 3672, 3674, 3675, 3676, 3677, 3678, 3679, 3680, 3681, 3683, 3684, 3685, 3686, 3687, 3688, 3689, 3691, 3692, 3693, 3695, 3696, 3697, 3698, 3699, 3700, 3701, 3702, 3703, 3704, 3705, 3706, 3708, 3709, 3710, 3711, 3712, 3713, 3714, 3715, 3717, 3718, 3719, 3720, 3721, 3722, 3723, 3724, 3725, 3726, 3728, 3729, 3730, 3731, 3732, 3733, 3734, 3735, 3738, 3739, 3740, 3741, 3742, 3743, 3745, 3746, 3747, 3748, 3749, 3750, 3751, 3752, 3754, 3755, 3756, 3757, 3758, 3759, 3760, 3761, 3762, 3763, 3764, 3766, 3767, 3768, 3769, 3770, 3771, 3772, 3773, 3774, 3775, 3776, 3777, 3778, 3779, 3780, 3781, 3782, 3783, 3784, 3785, 3786, 3787, 3788, 3789, 4463, 3792, 3793, 3794, 3795, 3796, 3797, 3800, 3801, 3802, 3803, 3804, 3805, 3806, 3807, 3808, 3809, 3810, 3811, 3812, 3813, 3814, 3815, 3816, 3817, 3818, 3819, 3820, 3821, 3822, 3823, 3824, 3825, 3826, 3827, 3828, 3829, 3830, 3831, 3832, 3833, 3834, 3835, 3837, 3838, 3839, 3840, 3841, 3842, 3843, 3844, 3845, 3846, 3847, 3848, 3849, 3851, 3852, 3853, 3854, 3855, 3856, 3857, 3858, 3859, 3860, 3861, 3862, 3863, 3864, 3865, 3866, 3867, 3868, 3869, 3870, 3871, 3873, 3874, 3875, 3876, 3877, 3878, 3879, 3880, 3882, 3883, 3884, 3886, 3887, 3888, 3889, 3890, 3891, 3892, 3893, 3894, 3895, 3896, 3897, 3898, 3899, 3900, 3901, 3902, 3903, 3904, 3905, 3906, 3907, 3908, 3909, 3910, 3911, 3912, 3913, 3914, 3917, 3918, 3919, 3920, 3921, 3923, 3924, 3925, 3926, 3927, 3928, 3929, 3930, 3932, 3933, 3934, 3935, 3936, 3937, 3939, 3940, 3941, 3942, 3943, 3944, 3945, 3946, 3947, 3948, 3949, 3950, 3951, 3952, 3953, 3954, 3955, 3956, 3957, 3958, 3959, 3960, 3961, 3962, 3963, 3964, 3965, 3966, 3967, 3968, 3970, 3971, 3972, 3973, 3974, 3975, 3976, 3977, 3978, 3979, 3980, 3981, 3982, 3983, 3984, 3985, 3986, 3987, 3988, 3989, 3990, 3991, 3992, 3993, 3994, 3995, 3996, 3997, 3998, 3999, 4000, 4001, 4002, 4003, 4004, 4005, 4006, 4007, 4008, 4009, 4010, 4012, 4013, 4014, 4015, 4016, 4018, 4019, 4020, 4021, 4022, 4023, 4024, 4025, 4026, 4027, 4028, 4029, 4030, 4031, 4032, 4033, 4034, 4035, 4036, 4037, 4038, 4039, 4040, 4041, 4042, 4043, 4044, 4045, 4046, 4047, 4048, 4049, 4050, 4051, 4052, 4053, 4054, 4055, 4057, 4058, 4060, 4061, 4062, 4063, 4064, 4065, 4066, 4067, 4069, 4070, 4071, 4072, 4073, 4074, 4075, 4086, 4087, 4088, 4089, 4091, 4092, 4093, 4094, 4095, 4096, 4097, 4098, 4099, 4100, 4101, 4102, 4103, 4104, 4105, 4107, 4108, 4109, 4110, 4111, 4113, 4114, 4115, 4116, 4118, 4119, 4120, 4121, 4122, 4123, 4124, 4125, 4126, 4127, 4128, 4129, 4130, 4131, 4132, 4133, 4134, 4135, 4136, 4137, 4138, 4139, 4140, 4141, 4142, 4143, 4146, 4147, 4148, 4149, 4150, 4151, 4152, 4153, 4154, 4155, 4156, 4157, 4177, 4178, 4183, 4184, 4185, 4186, 4187, 4188, 4189, 4190, 4191, 4192, 4193, 4194, 4195, 4196, 4197, 4198, 4199, 4200, 4202, 4203, 4204, 4205, 4206, 4207, 4208, 4209, 4210, 4211, 4212, 4213, 4214, 4215, 4216, 4217, 4218, 4219, 4220, 4222, 4223, 4224, 4225, 4226, 4227, 4228, 4229, 4230, 4231, 4232, 4233, 4234, 4236, 4237, 4238, 4239, 4240, 4241, 4242, 4243, 4244, 4245, 4246, 4247, 4248, 4249, 4250, 4251, 4252, 4253, 4254, 4255, 4256, 4257, 4258, 4259, 4260, 4261, 4262, 4263, 4264, 4265, 4266, 4267, 4268, 4269, 4270, 4271, 4272, 4273, 4274, 4275, 4276, 4277, 4278, 4279, 4280, 4281, 4282, 4283, 4284, 4286, 4287, 4289, 4290, 4291, 4292, 4293, 4294, 4295, 4296, 4297, 4298, 4299, 4300, 4301, 4302, 4303, 4304, 4306, 4307, 4308, 4309, 4310, 4311, 4312, 4313, 4314, 4315, 4316, 4317, 4318, 4319, 4320, 4321, 4322, 4324, 4325, 4326, 4327, 4328, 4329, 4330, 4331, 4332, 4334, 4335, 4337, 4338, 4339, 4340, 4341, 4342, 4343, 4344, 4345, 4346, 4347, 4348, 4349, 4350, 4351, 4352, 4354, 4355, 4356, 4357, 4358, 4359, 4360, 4361, 4362, 4363, 4364, 4365, 4366, 4367, 4368, 4369, 4370, 4371, 4372, 4373, 4374, 4375, 4376, 4377, 4378, 4379, 4380, 4381, 4382, 4383, 4384, 4385, 4386, 4387, 4388, 4389, 4390, 4391, 4392, 4393, 4394, 4395, 4396, 4397, 4399, 4400, 4401, 4402, 4403, 4404, 4405, 4406, 4407, 4408, 4410, 4411, 4412, 4413, 4414, 4415, 4416, 4418, 4419, 4420, 4422, 4424, 4425, 4426, 4427, 4428, 4430, 4431, 4432, 4433, 4434, 4436, 4437, 4438, 4439, 4440, 4441, 4442, 4443, 4444, 4445, 4446, 4447, 4449, 4451, 4452, 4453, 4454, 4455, 4456, 4457, 4458, 4459, 4460, 4461, 4462, 4463, 4464, 4465, 4466, 4467, 4468, 4470, 4471, 4473, 4474, 4475, 4477, 4478, 4479, 4480, 4481, 4483, 4484, 4485, 4486, 4487, 4489, 4490, 4491, 4492, 4493, 4494, 4495, 4496, 4497, 4498, 4499, 4500, 4501, 4502, 4503, 4504, 4505, 4506, 4507, 4508, 4509, 4510, 4511, 4512, 4514, 4515, 4516, 4517, 4519, 4520, 4521, 4522, 4523, 4524, 4525, 4526, 4527, 4528, 4529, 4530, 4531, 4532, 4533, 4534, 4535, 4536, 4537, 4538, 4539, 4540, 4541, 4542, 4543, 4545, 4546, 4547, 4548, 4549, 4550, 4551, 4552, 4553, 4554, 4555, 4556, 4557, 4558, 4561, 4562, 4563, 4564, 4565, 4566, 4567, 4568, 4570, 4572, 4573, 4574, 4575, 4576, 4577, 4579, 4580, 4581, 4582, 4583, 4584, 4585, 4586, 4587, 4588, 4589, 4590, 4591, 4592, 4593, 4594, 4595, 4596, 4597, 4598, 4599, 4600, 4601, 4602, 4603, 4604, 4605, 4606, 4608, 4609, 4610, 4611, 4612, 4613, 4614, 4615, 4616, 4617, 4618, 4619, 4620, 4621, 4623, 4624, 4625, 4626, 4627, 4628, 4629, 4630, 4632, 4633, 4634, 4635, 4636, 4637, 4638, 4639, 4640, 4641, 4644, 4645, 4646, 4649, 4651, 4652, 4653, 4654, 4655, 4656, 4657, 4659, 4660, 4661, 4662, 4663, 4664, 4665, 4666, 4667, 4668, 4670, 4671, 4673, 4674, 4675, 4676, 4677, 4678, 4679, 4680, 4681, 4683, 4684, 4685, 4686, 4690, 4691, 4692, 4693, 4694, 4695, 4696, 4697, 4698, 4699, 4700, 4701, 4702, 4703, 4705, 4706, 4708, 4709, 4710, 4711, 4712, 4713, 4714, 4715, 4716, 4717, 4719, 4720, 4721, 4722, 4723, 4724, 4725, 4726, 4728, 4729, 4730, 4731, 4732, 4733, 4734, 4735, 4736, 4737, 4738, 4739, 4740, 4741, 4742, 4743, 4744, 4745, 4746, 4747, 4748, 4749, 4750, 4751, 4752, 4753, 4755, 4756, 4757, 4758, 4759, 4760, 4761, 4762, 4763, 4764, 4765, 4766, 4768, 4769, 4770, 4771, 4772, 4773, 4774, 4775, 4776, 4777, 4778, 4779, 4780, 4781, 4782, 4783, 4784, 4785, 4787, 4788, 4789, 4790, 4791, 4793, 4794, 4795, 4796, 4798, 4799, 4800, 4801, 4802, 4803, 4805, 4806, 4807, 4808, 4809, 4810, 4811, 4813, 4815, 4816, 4817, 4818, 4819, 4820, 4821, 4822, 4824, 4825, 4826, 4827, 4828, 4829, 4831, 4832, 4834, 4835, 4836, 4837, 4839, 4840, 4841, 4842, 4843, 4844, 4845, 4846, 4847, 4850, 4851, 4852, 4853, 4854, 4855, 4856, 4857, 4858, 4860, 4861, 4863, 4864, 4865, 4866, 4867, 4868, 4869, 4870, 4871, 4873, 4874, 4875, and 4876.

[0104] In a third aspect, the present invention relates to an isolated biologically active substance encoded by a polynucleotide that hybridizes, as described above, under very low stringency conditions, preferably low stringency conditions, more preferably medium stringency conditions, more preferably medium-high stringency conditions, even more preferably high stringency conditions, and most preferably very high stringency conditions with a polynucleotide selected from the group consisting of (i) the polynucleotides of SEQ ID NOs: 2-4876, and subsequences thereof, and (ii) full-length complementary strands thereof. A subsequence of any of SEQ ID NOs: 2-4876 may be at least 100 nucleotides or preferably at least 200 nucleotides. Moreover, the subsequence may encode a fragment, e.g., a fragment that has biological activity.

[0105] In a fourth aspect, the present invention relates to an artificial variant comprising a substitution, deletion, and/or insertion of one or more (several) amino acids of an amino acid sequence selected from the group consisting of SEQ ID NOs: 4877-9751 and fragments thereof retaining biological activity, as described above.

### Nucleic Acid Constructs

[0106] The present invention also relates to nucleic acid constructs comprising an isolated polynucleotide or isolated polynucleotides (e.g., operon) of the present invention operably linked to one or more (several) control sequences that direct the expression of the coding sequence in a suitable host cell under conditions compatible with the control sequences.

[0107] An isolated polynucleotide(s) of the present invention may be manipulated in a variety of ways to provide for production of a biologically active substance encoded directly or indirectly by the polynucleotide(s). Manipulation of the nucleotide sequence prior to its insertion into a vector may be desirable or necessary depending on the expression vector. The techniques for modifying nucleotide sequences utilizing recombinant DNA methods are well known in the art.

[0108] The control sequence may be an appropriate promoter sequence, a nucleotide sequence that is recognized by a host cell for expression of the polynucleotide(s) encoding the biologically active substance. The promoter sequence contains transcriptional control sequences that mediate the expression of the biologically active substance. The promoter may be any nucleotide sequence that shows transcriptional activity in the host cell of choice including mutant, truncated, and hybrid promoters, and may be obtained from genes encoding extracellular or intracellular polypeptides or biologically active substances either homologous or heterologous to the host cell.

[0109] Examples of suitable promoters for directing the transcription of the nucleic acid constructs of the present invention, especially in a bacterial host cell, are the promoters obtained from the E. coli lac operon, Streptomyces coelicolor agarase gene (dagA), Bacillus subtilis levansucrase gene (sacB), Bacillus licheniformis alpha-amylase gene (amyL), Bacillus stearothermophilus maltogenic amylase gene (amyM), Bacillus amyloliquefaciens alpha-amylase gene (amyQ), Bacillus licheniformis penicillinase gene (penP), Bacillus subtilis xylA and xylB genes, and prokaryotic beta-lactamase gene (VIIIa-Kamaroff et al., 1978, Proceedings of the National Academy of Sciences USA 75: 3727-3731), as well as the tac promoter (DeBoer et al., 1983, Proceedings of the National Academy of Sciences USA 80: 21-25). Further promoters are described in “Useful proteins from recombinant bacteria” in Scientific American, 1980, 242: 74-94; and in Sambrook et al., 1989, supra.

[0110] The control sequence may also be a suitable transcription terminator sequence, a sequence recognized by a host cell to terminate transcription. The terminator sequence is operably linked to the 3′ terminus of the gene encoding the biologically active substance. Any terminator that is functional in the host cell of choice may be used in the present invention.

[0111] The control sequence may also be a signal peptide coding region that codes for an amino acid sequence linked to the amino terminus of a polypeptide and directs the encoded polypeptide into the cell's secretory pathway. The 5′ end of the coding sequence of the nucleotide sequence may inherently contain a signal peptide coding region naturally linked in translation reading frame with the segment of the coding region that encodes the secreted polypeptide. Alternatively, the 5′ end of the coding sequence may contain a signal peptide coding region that is foreign to the coding sequence. The foreign signal peptide coding region may be required where the coding sequence does not naturally contain a signal peptide coding region. Alternatively, the foreign signal peptide coding region may simply replace the natural signal peptide coding region in order to enhance secretion of the polypeptide. However, any signal peptide coding region that directs the expressed polypeptide into the secretory pathway of a host cell of choice may be used in the present invention.

[0112] Effective signal peptide coding regions for bacterial host cells are the signal peptide coding regions obtained from the genes for Bacillus NCIB 11837 maltogenic amylase, Bacillus stearothermophilus alpha-amylase, Bacillus licheniformis subtilisin, Bacillus licheniformis beta-lactamase, Bacillus stearothermophilus neutral proteases (nprT, nprS, nprM), and Bacillus subtilis prsA. Further signal peptides are described by Simonen and Palva, 1993, Microbiological Reviews 57: 109-137.

[0113] The control sequence may also be a propeptide coding region that codes for an amino acid sequence positioned at the amino terminus of a polypeptide. The resultant polypeptide is known as a proenzyme or propolypeptide (or a zymogen in some cases). A propolypeptide is generally inactive and can be converted to a mature active polypeptide by catalytic or autocatalytic cleavage of the propeptide from the propolypeptide. The propeptide coding region may be obtained from the genes for Bacillus subtilis alkaline protease (aprE) and Bacillus subtilis neutral protease (nprT).

[0114] Where both signal peptide and propeptide regions are present at the amino terminus of a polypeptide, the propeptide region is positioned next to the amino terminus of a polypeptide and the signal peptide region is positioned next to the amino terminus of the propeptide region.

[0115] It may also be desirable to add regulatory sequences that allow the regulation of the expression of a biologically active substance relative to the growth of the host cell. Examples of regulatory systems are those that cause the expression of the gene to be turned on or off in response to a chemical or physical stimulus, including the presence of a regulatory compound. Regulatory systems in prokaryotic systems include the lac, tac, and trp operator systems. Other examples of regulatory sequences are those that allow for gene amplification. In eukaryotic systems, these include the dihydrofolate reductase gene that is amplified in the presence of methotrexate, and the metallothionein genes that are amplified with heavy metals. In these cases, the nucleotide sequence encoding the biologically active substance would be operably linked with the regulatory sequence.

### Expression Vectors

[0116] The present invention also relates to recombinant expression vectors comprising an isolated polynucleotide of the present invention, a promoter, and transcriptional and translational stop signals. The various nucleic acid and control sequences described above may be joined together to produce a recombinant expression vector that may include one or more (several) convenient restriction sites to allow for insertion or substitution of the nucleotide sequence encoding the polypeptide at such sites. Alternatively, a polynucleotide of the present invention may be expressed by inserting the nucleotide sequence or a nucleic acid construct comprising the sequence into an appropriate vector for expression. In creating the expression vector, the coding sequence is located in the vector so that the coding sequence is operably linked with the appropriate control sequences for expression.

[0117] The recombinant expression vector may be any vector (e.g., a plasmid or virus) that can be conveniently subjected to recombinant DNA procedures and can bring about the expression of a polynucleotide of the present invention. The choice of the vector will typically depend on the compatibility of the vector with the host cell into which the vector is to be introduced. The vectors may be linear or closed circular plasmids.

[0118] The vector may be an autonomously replicating vector, i.e., a vector that exists as an extrachromosomal entity, the replication of which is independent of chromosomal replication, e.g., a plasmid, an extrachromosomal element, a minichromosome, or an artificial chromosome. The vector may contain any means for assuring self-replication. Alternatively, the vector may be one that, when introduced into the host cell, is integrated into the genome and replicated together with the chromosome(s) into which it has been integrated. Furthermore, a single vector or plasmid or two or more vectors or plasmids that together contain the total DNA to be introduced into the genome of the host cell, or a transposon may be used.

[0119] The vectors of the present invention preferably contain one or more (several) selectable markers that permit easy selection of transformed cells. A selectable marker is a gene the product of which provides for biocide or viral resistance, resistance to heavy metals, prototrophy to auxotrophs, and the like.

[0120] Examples of bacterial selectable markers are the dal genes from Bacillus subtilis or Bacillus licheniformis, or markers that confer antibiotic resistance such as ampicillin, kanamycin, chloramphenicol or tetracycline resistance.

[0121] The vectors of the present invention preferably contain an element(s) that permits integration of the vector into the host cell's genome or autonomous replication of the vector in the cell independent of the genome.

[0122] For integration into the host cell genome, the vector may rely on portions of the sequence of the gene or any other element of the vector for integration of the vector into the genome by homologous or nonhomologous recombination. Alternatively, the vector may contain additional nucleotide sequences for directing integration by homologous recombination into the genome of the host cell. The additional nucleotide sequences enable the vector to be integrated into the host cell genome at a precise location(s) in the chromosome(s). To increase the likelihood of integration at a precise location, the integrational elements should preferably contain a sufficient number of nucleotides, such as 100 to 10,000 base pairs, preferably 400 to 10,000 base pairs, and most preferably 800 to 10,000 base pairs, which are highly homologous with the corresponding target sequence to enhance the probability of homologous recombination. The integrational elements may be any sequence that is homologous with the target sequence in the genome of the host cell. Furthermore, the integrational elements may be non-encoding or encoding nucleotide sequences. On the other hand, the vector may be integrated into the genome of the host cell by non-homologous recombination.

[0123] For autonomous replication, the vector may further comprise an origin of replication enabling the vector to replicate autonomously in the host cell in question. The origin of replication may be any plasmid replicator mediating autonomous replication that functions in a cell. The term “origin of replication” or “plasmid replicator” is defined herein as a sequence that enables a plasmid or vector to replicate in vivo. Examples of bacterial origins of replication are the origins of replication of plasmids pBR322, pUC19, pACYC177, and pACYC184 permitting replication in E. coli, and pUB110, pE194, pTA1060, and pAMβ1 permitting replication in Bacillus.

[0124] More than one copy of a polynucleotide of the present invention may be inserted into the host cell to increase production of the polynucleotide product. An increase in the copy number of the polynucleotide can be obtained by integrating at least one additional copy of the sequence into the host cell genome or by including an amplifiable selectable marker gene with a polynucleotide of the present invention where cells containing amplified copies of the selectable marker gene, and thereby additional copies of the polynucleotide of the present invention, can be selected for by cultivating the cells in the presence of the appropriate selectable agent.

[0125] The procedures used to ligate the elements described above to construct the recombinant expression vectors of the present invention are well known to one skilled in the art (see, e.g., Sambrook et al., 1989, supra).

### Host Cells

[0126] The present invention also relates to recombinant host cells, comprising an isolated polynucleotide of the present invention, where the host cells are advantageously used in the recombinant production of a biologically active substance encoded by the polynucleotide. A vector comprising a polynucleotide of the present invention is introduced into a host cell so that the vector is maintained as a chromosomal integrant or as a self-replicating extra-chromosomal vector as described earlier. The term “host cell” encompasses any progeny of a parent cell that is not identical to the parent cell due to mutations that occur during replication. The choice of a host cell will to a large extent depend upon the polynucleotide encoding the biologically active substance and its source.

[0127] The host cell may be any unicellular microorganism, e.g., a prokaryote, or a non-unicellular microorganism, e.g., a eukaryote.

[0128] The bacterial host cell may be any Gram positive bacterium or a Gram negative bacterium. Gram positive bacteria include, but not limited to, Bacillus, Streptococcus, Streptomyces, Staphylococcus, Enterococcus, Lactobacillus, Lactococcus, Clostridium, Geobacillus, and Oceanobacillus. Gram negative bacteria include, but not limited to, E. coli, Pseudomonas, Salmonella, Campylobacter, Helicobacter, Flavobacterium, Fusobacterium, Hyobacter, Neisseria, and Ureaplasma.

[0129] The bacterial host cell may be any Bacillus cell. Bacillus cells useful in the practice of the present invention include, but are not limited to, Bacillus alkalophilus, Bacillus amyloliquefaciens, Bacillus brevis, Bacillus circulans, Bacillus clausii, Bacillus coagulans, Bacillus firmus, Bacillus lautus, Bacillus lentus, Bacillus licheniformis, Bacillus megaterium, Bacillus pumilus, Bacillus stearothermophilus, Bacillus subtilis, and Bacillus thuringiensis cells.

[0130] In a preferred aspect, the bacterial host cell is a Bacillus amyloliquefaciens, Bacillus lentus, Bacillus licheniformis, Bacillus stearothermophilus or Bacillus subtilis cell. In a more preferred aspect, the bacterial host cell is a Bacillus amyloliquefaciens cell. In another more preferred aspect, the bacterial host cell is a Bacillus clausii cell. In another more preferred aspect, the bacterial host cell is a Bacillus licheniformis cell. In another more preferred aspect, the bacterial host cell is a Bacillus subtilis cell.

[0131] The bacterial host cell may also be any Streptococcus cell. Streptococcus cells useful in the practice of the present invention include, but are not limited to, Streptococcus equisimilis, Streptococcus pyogenes, Streptococcus uberis, and Streptococcus equi subsp. Zooepidemicus.

[0132] In a preferred aspect, the bacterial host cell is a Streptococcus equisimilis cell. In another preferred aspect, the bacterial host cell is a Streptococcus pyogenes cell. In another preferred aspect, the bacterial host cell is a Streptococcus uberis cell. In another preferred aspect, the bacterial host cell is a Streptococcus equi subsp. Zooepidemicus cell.

[0133] The bacterial host cell may also be any Streptomyces cell. Streptomyces cells useful in the practice of the present invention include, but are not limited to, Streptomyces achromogenes, Streptomyces avermitilis, Streptomyces coelicolor, Streptomyces griseus, and Streptomyces lividans.

[0134] In a preferred aspect, the bacterial host cell is a Streptomyces achromogenes cell. In another preferred aspect, the bacterial host cell is a Streptomyces avermitilis cell. In another preferred aspect, the bacterial host cell is a Streptomyces coelicolor cell. In another preferred aspect, the bacterial host cell is a Streptomyces griseus cell. In another preferred aspect, the bacterial host cell is a Streptomyces lividans cell.

[0135] The introduction of DNA into a Bacillus cell may, for instance, be effected by protoplast transformation (see, e.g., Chang and Cohen, 1979, Molecular General Genetics 168: 111-115), by using competent cells (see, e.g., Young and Spizizen, 1961, Journal of Bacteriology 81: 823-829, or Dubnau and Davidoff-Abelson, 1971, Journal of Molecular Biology 56: 209-221), by electroporation (see, e.g., Shigekawa and Dower, 1988, Biotechniques 6: 742-751), or by conjugation (see, e.g., Koehler and Thorne, 1987, Journal of Bacteriology 169: 5271-5278). The introduction of DNA into an E. coli cell may, for instance, be effected by protoplast transformation (see, e.g., Hanahan, 1983, J. Mol. Biol. 166: 557-580) or electroporation (see, e.g., Dower et al., 1988, Nucleic Acids Res. 16: 6127-6145). The introduction of DNA into a Streptomyces cell may, for instance, be effected by protoplast transformation and electroporation (see, e.g., Gong et al., 2004, Folia Microbiol. (Praha) 49: 399-405), by conjugation (see, e.g., Mazodier et al., 1989, J. Bacteriol. 171: 3583-3585), or by transduction (see, e.g., Burke et al., 2001, Proc. Natl. Acad. Sci. USA 98:6289-6294). The introduction of DNA into a Pseudomonas cell may, for instance, be effected by electroporation (see, e.g., Choi et al., 2006, J. Microbiol. Methods 64: 391-397) or by conjugation (see, e.g., Pinedo and Smets, 2005, Appl. Environ. Microbiol. 71: 51-57). The introduction of DNA into a Streptococcus cell may, for instance, be effected by natural competence (see, e.g., Perry and Kuramitsu, 1981, Infect. Immun. 32: 1295-1297), by protoplast transformation (see, e.g., Catt and Jollick, 1991, Microbios. 68: 189-2070, by electroporation (see, e.g., Buckley et al., 1999, Appl. Environ. Microbiol. 65: 3800-3804) or by conjugation (see, e.g., Clewell, 1981, Microbiol. Rev. 45: 409-436). However, any method known in the for introducing DNA into a host cell can be used.

### Methods of Production

[0136] The present invention also relates to methods for producing a biologically active substance of the present invention comprising (a) cultivating a strain, which in its wild-type form is capable of producing the biologically active substance, under conditions conducive for production of the biologically active substance; and (b) recovering the biologically active substance. Preferably, the strain is of the genus Bacillus, and more preferably Bacillus licheniformis.

[0137] The present invention also relates to methods for producing a biologically active substance of the present invention comprising (a) cultivating a host cell under conditions conducive for production of the biologically active substance; and (b) recovering the biologically active substance.

[0138] The present invention also relates to methods for producing a biologically active substance of the present invention comprising (a) cultivating a host cell under conditions conducive for production of the biologically active substance, wherein the host cell comprises a mutant polynucleotide comprising at least one mutation in the coding region of any of SEQ ID NOs: 2-4876, wherein the mutant polynucleotide encodes a biologically active substance that consists of SEQ ID NOs: 4877-9751, respectively, and (b) recovering the biologically active substance.

[0139] In the production methods of the present invention, the cells are cultivated in a nutrient medium suitable for production of the biologically active substance using methods known in the art. For example, the cell may be cultivated by shake flask cultivation, and small-scale or large-scale fermentation (including continuous, batch, fed-batch, or solid state fermentations) in laboratory or industrial fermentors performed in a suitable medium and under conditions allowing the biologically active substance to be expressed and/or isolated. The cultivation takes place in a suitable nutrient medium comprising carbon and nitrogen sources and inorganic salts, using procedures known in the art. Suitable media are available from commercial suppliers or may be prepared according to published compositions (e.g., in catalogues of the American Type Culture Collection). If the biologically active substance is secreted into the nutrient medium, the biologically active substance can be recovered directly from the medium. If the biologically active substance is not secreted, it can be recovered from cell lysates.

[0140] The biologically active substances may be detected using methods known in the art that are specific for the polypeptides. These detection methods may include use of specific antibodies, formation of an enzyme product, or disappearance of an enzyme substrate. For example, an enzyme assay may be used to determine the activity of an enzyme. See, for example, Enzyme Nomenclature, Academic Press, Inc., New York, 2007.

[0141] The resulting biologically active substances may be recovered by methods known in the art. For example, the biologically active substances may be recovered from the nutrient medium by conventional procedures including, but not limited to, centrifugation, filtration, extraction, spray-drying, evaporation, or precipitation.

[0142] The biologically active substances of the present invention may be purified by a variety of procedures known in the art including, but not limited to, chromatography (e.g., ion exchange, affinity, hydrophobic, chromatofocusing, and size exclusion), electrophoretic procedures (e.g., preparative isoelectric focusing), differential solubility (e.g., ammonium sulfate precipitation), SDS-PAGE, or extraction (see, e.g., Protein Purification, J.-C. Janson and Lars Ryden, editors, VCH Publishers, New York, 1989).

### Plants

[0143] The present invention also relates to a transgenic plant, plant part, or plant cell, which has been transformed with a polynucleotide encoding a biologically active substance of the present invention so as to express and produce the biologically active substance in recoverable quantities. The biologically active substance may be recovered from the plant or plant part. Alternatively, the plant or plant part containing the recombinant biologically active substance may be used as such for improving the quality of a food or feed, e.g., improving nutritional value, palatability, and rheological properties, or to destroy an antinutritive factor.

[0144] The transgenic plant can be dicotyledonous (a dicot) or monocotyledonous (a monocot). Examples of monocot plants are grasses, such as meadow grass (blue grass, Poa), forage grass such as festuca, lolium, temperate grass, such as Agrostis, and cereals, e.g., wheat, oats, rye, barley, rice, sorghum, and maize (corn).

[0145] Examples of dicot plants are tobacco, legumes, such as lupins, potato, sugar beet, pea, bean and soybean, and cruciferous plants (family Brassicaceae), such as cauliflower, rape seed, and the closely related model organism Arabidopsis thaliana.

[0146] Examples of plant parts are stem, callus, leaves, root, fruits, seeds, and tubers as well as the individual tissues comprising these parts, e.g., epidermis, mesophyll, parenchyme, vascular tissues, meristems. In the present context, also specific plant cell compartments, such as chloroplast, apoplast, mitochondria, vacuole, peroxisomes and cytoplasm are considered to be a plant part. Furthermore, any plant cell, whatever the tissue origin, is considered to be a plant part. Likewise, plant parts such as specific tissues and cells isolated to facilitate the utilisation of the invention are also considered plant parts e.g. embryos, endosperms, aleurone and seeds coats.

[0147] Also included within the scope of the present invention are the progeny of such plants, plant parts, and plant cells.

[0148] The transgenic plant or plant cell expressing a biologically active substance of the present invention may be constructed in accordance with methods known in the art. Briefly, the plant or plant cell is constructed by incorporating one or more (several) expression constructs encoding a biologically active substance of the present invention into the plant host genome and propagating the resulting modified plant or plant cell into a transgenic plant or plant cell.

[0149] The expression construct is conveniently a nucleic acid construct that comprises a polynucleotide encoding a biologically active substance of the present invention operably linked with appropriate regulatory sequences required for expression of the nucleotide sequence in the plant or plant part of choice. Furthermore, the expression construct may comprise a selectable marker useful for identifying host cells into which the expression construct has been integrated and DNA sequences necessary for introduction of the construct into the plant in question (the latter depends on the DNA introduction method to be used).

[0150] The choice of regulatory sequences, such as promoter and terminator sequences and optionally signal or transit sequences is determined, for example, on the basis of when, where, and how the biologically active substance is desired to be expressed. For instance, the expression of the polynucleotide encoding a biologically active substance of the present invention may be constitutive or inducible, or may be developmental, stage or tissue specific, and the gene product may be targeted to a specific tissue or plant part such as seeds or leaves. Regulatory sequences are, for example, described by Tague et al., 1988, Plant Physiology 86: 506.

[0151] For constitutive expression the 35S-CaMV, the maize ubiquitin 1 and the rice actin 1 promoter may be used (Franck et al., 1980. Cell 21: 285-294, Christensen A H, Sharrock R A and Quail, 1992, Plant Mo. Biol. 18: 675-689.; Zhang W, McElroy D. and Wu R., 1991, Plant Cell 3: 1155-1165). Organ-specific promoters may be, for example, a promoter from storage sink tissues such as seeds, potato tubers, and fruits (Edwards and Coruzzi, 1990, Ann. Rev. Genet. 24: 275-303), or from metabolic sink tissues such as meristems (Ito et al., 1994, Plant Mol. Biol. 24: 863-878), a seed specific promoter such as the glutelin, prolamin, globulin, or albumin promoter from rice (Wu et al., 1998, Plant and Cell Physiology 39: 885-889), a Vicia faba promoter from the legumin B4 and the unknown seed protein gene from Vicia faba (Conrad et al., 1998, Journal of Plant Physiology 152: 708-711), a promoter from a seed oil body protein (Chen et al., 1998, Plant and Cell Physiology 39: 935-941), the storage protein napA promoter from Brassica napus, or any other seed specific promoter known in the art, e.g., as described in WO 91/14772. Furthermore, the promoter may be a leaf specific promoter such as the rbcs promoter from rice or tomato (Kyozuka et al., 1993, Plant Physiology 102: 991-1000, the chlorella virus adenine methyltransferase gene promoter (Mitra and Higgins, 1994, Plant Molecular Biology 26: 85-93), or the aldP gene promoter from rice (Kagaya et al., 1995, Molecular and General Genetics 248: 668-674), or a wound inducible promoter such as the potato pin2 promoter (Xu et al., 1993, Plant Molecular Biology 22: 573-588). Likewise, the promoter may inducible by abiotic treatments such as temperature, drought or alterations in salinity or induced by exogenously applied substances that activate the promoter, e.g., ethanol, oestrogens, plant hormones like ethylene, abscisic acid and gibberellic acid and heavy metals.

[0152] A promoter enhancer element may also be used to achieve higher expression of the enzyme in the plant. For instance, the promoter enhancer element may be an intron that is placed between the promoter and the nucleotide sequence encoding a biologically active substance of the present invention. For instance, Xu et al., 1993, supra disclose the use of the first intron of the rice actin 1 gene to enhance expression. The selectable marker gene and any other parts of the expression construct may be chosen from those available in the art.

[0153] The nucleic acid construct is incorporated into the plant genome according to conventional techniques known in the art, including Agrobacterium-mediated transformation, virus-mediated transformation, microinjection, particle bombardment, biolistic transformation, and electroporation (Gasser et al., 1990, Science 244: 1293; Potrykus, 1990, Bio/Technology 8: 535; Shimamoto et al., 1989, Nature 338: 274).

[0154] Presently, Agrobacterium tumefaciens-mediated gene transfer is the method of choice for generating transgenic dicots (for a review, see Hooykas and Schilperoort, 1992, Plant Molecular Biology 19: 15-38). However it can also be used for transforming monocots, although other transformation methods are generally preferred for these plants. Presently, the method of choice for generating transgenic monocots is particle bombardment (microscopic gold or tungsten particles coated with the transforming DNA) of embryonic calli or developing embryos (Christou, 1992, Plant Journal 2: 275-281; Shimamoto, 1994, Current Opinion Biotechnology 5: 158-162; Vasil et al., 1992, Bio/Technology 10: 667-674). An alternative method for transformation of monocots is based on protoplast transformation as described by Omirulleh et al., 1993, Plant Molecular Biology 21: 415-428.

[0155] Following transformation, the transformants having incorporated therein the expression construct are selected and regenerated into whole plants according to methods well-known in the art. Often the transformation procedure is designed for the selective elimination of selection genes either during regeneration or in the following generations by using, for example, co-transformation with two separate T-DNA constructs or site specific excision of the selection gene by a specific recombinase.

[0156] The present invention also relates to methods for producing a biologically active substance of the present invention comprising (a) cultivating a transgenic plant or a plant cell comprising a polynucleotide encoding a biologibally active substance of the present invention under conditions conducive for production of the biologically active substance; and (b) recovering the biologically active substance.

### Removal or Reduction of Biologically Active Substance

[0157] The present invention also relates to methods for producing a mutant of a parent cell, which comprises disrupting or deleting all or a portion of a polynucleotide encoding a biologically active substance of the present invention, which results in the mutant cell producing less of the biologically active substance than the parent cell when cultivated under the same conditions.

[0158] The mutant cell may be constructed by reducing or eliminating expression of a gene encoding or regulatory synthesis of a biologically active substance of the present invention using methods well known in the art, for example, insertions, disruptions, replacements, or deletions. The gene to be modified or inactivated may be, for example, the coding region or a part thereof essential for activity, or a regulatory element of the gene required for the expression of the coding region. An example of such a regulatory or control sequence may be a promoter sequence or a functional part thereof, i.e., a part that is sufficient for affecting expression of the gene. Other control sequences for possible modification include, but are not limited to, a leader, propeptide sequence, signal peptide sequence, transcription terminator, and transcriptional activator.

[0159] Modification or inactivation of the gene may be performed by subjecting the parent cell to mutagenesis and selecting for mutant cells in which expression of the gene has been reduced or eliminated. The mutagenesis, which may be specific or random, may be performed, for example, by use of a suitable physical or chemical mutagenizing agent, by use of a suitable oligonucleotide, or by subjecting the DNA sequence to PCR generated mutagenesis. Furthermore, the mutagenesis may be performed by use of any combination of these mutagenizing agents.

[0160] Examples of a physical or chemical mutagenizing agent suitable for the present purpose include ultraviolet (UV) irradiation, hydroxylamine, N-methyl-N′-nitro-N-nitrosoguanidine (MNNG), O-methyl hydroxylamine, nitrous acid, ethyl methane sulphonate (EMS), sodium bisulphite, formic acid, and nucleotide analogues.

[0161] When such agents are used, the mutagenesis is typically performed by incubating the parent cell to be mutagenized in the presence of the mutagenizing agent of choice under suitable conditions, and screening and/or selecting for mutant cells exhibiting reduced or no expression of the gene.

[0162] Modification or inactivation of the nucleotide sequence may be accomplished by introduction, substitution, or removal of one or more (several) nucleotides in the gene or a regulatory element required for the transcription or translation thereof. For example, nucleotides may be inserted or removed so as to result in the introduction of a stop codon, the removal of the start codon, or a change in the open reading frame. Such modification or inactivation may be accomplished by site-directed mutagenesis or PCR generated mutagenesis in accordance with methods known in the art. Although, in principle, the modification may be performed in vivo, i.e., directly on the cell expressing the nucleotide sequence to be modified, it is preferred that the modification be performed in vitro as exemplified below.

[0163] An example of a convenient way to eliminate or reduce expression of a nucleotide sequence by a cell of choice is based on techniques of gene replacement, gene deletion, or gene disruption. For example, in the gene disruption method, a nucleic acid sequence corresponding to the endogenous nucleotide sequence is mutagenized in vitro to produce a defective nucleic acid sequence that is then transformed into the parent cell to produce a defective gene. By homologous recombination, the defective nucleic acid sequence replaces the endogenous nucleotide sequence. It may be desirable that the defective nucleotide sequence also encodes a marker that may be used for selection of transformants in which the nucleotide sequence has been modified or destroyed. In a particularly preferred aspect, the nucleotide sequence is disrupted with a selectable marker such as those described herein.

[0164] Alternatively, modification or inactivation of the nucleotide sequence may be performed by established anti-sense or RNA interference (RNAi) techniques using a sequence complementary to the nucleotide sequence. More specifically, expression of the nucleotide sequence by a cell may be reduced or eliminated by introducing a sequence complementary to the nucleic acid sequence of the gene that may be transcribed in the cell and is capable of hybridizing to the mRNA produced in the cell. Under conditions allowing the complementary anti-sense nucleotide sequence to hybridize to the mRNA, the amount of protein translated is thus reduced or eliminated.

[0165] The present invention further relates to a mutant cell of a parent cell that comprises a disruption or deletion of a nucleotide sequence encoding the biologically active substance or a control sequence thereof, which results in the mutant cell producing less of the biologically active substance than the parent cell.

[0166] The biologically active substance-deficient mutant cells so created are particularly useful as host cells for the expression of homologous and/or heterologous substances, such as polypeptides. Therefore, the present invention further relates to methods for producing a homologous or heterologous substance comprising (a) cultivating the mutant cell under conditions conducive for production of the substance; and (b) recovering the substance. The term “heterologous substances” is defined herein as substances that are not native to the host cell, a native substance in which modifications have been made to alter the native sequence, or a native substance whose expression is quantitatively altered as a result of a manipulation of the host cell by recombinant DNA techniques.

[0167] In a further aspect, the present invention relates to a method for producing a protein product essentially free of a biologically active substance by fermentation of a cell that produces both a biologically active substance of the present invention as well as the protein product of interest by adding an effective amount of an agent capable of inhibiting activity of the biologically active substance to the fermentation broth before, during, or after the fermentation has been completed, recovering the product of interest from the fermentation broth, and optionally subjecting the recovered product to further purification.

[0168] In accordance with this aspect of the invention, it is possible to remove at least 60%, preferably at least 75%, more preferably at least 85%, still more preferably at least 95%, and most preferably at least 99% of the biologically active substance. Complete removal of biologically active substance may be obtained by use of this method.

[0169] The methods used for cultivation and purification of the product of interest may be performed by methods known in the art.

[0170] The methods of the present invention for producing an essentially biologically active substance-free product is of particular interest in the production of prokaryotic polypeptides, in particular bacterial proteins such as enzymes. The enzyme may be selected from, e.g., an amylolytic enzyme, lipolytic enzyme, proteolytic enzyme, cellulytic enzyme, oxidoreductase, or plant cell-wall degrading enzyme. Examples of such enzymes include an aminopeptidase, amylase, amyloglucosidase, carbohydrase, carboxypeptidase, catalase, cellulase, chitinase, cutinase, cyclodextrin glycosyltransferase, deoxyribonuclease, esterase, galactosidase, beta-galactosidase, glucoamylase, glucose oxidase, glucosidase, haloperoxidase, hemicellulase, invertase, isomerase, laccase, ligase, lipase, lyase, mannosidase, oxidase, pectinolytic enzyme, peroxidase, phytase, phenoloxidase, polyphenoloxidase, proteolytic enzyme, ribonuclease, transferase, transglutaminase, or xylanase. The biologically active substance-deficient cells may also be used to express heterologous proteins of pharmaceutical interest such as hormones, growth factors, receptors, polymers, e.g., hyaluronic acid and elastin, and the like.

[0171] It will be understood that the term “prokaryotic polypeptides” includes not only native polypeptides, but also those polypeptides, e.g., enzymes, which have been modified by amino acid substitutions, deletions or additions, or other such modifications to enhance activity, thermostability, pH tolerance and the like.

[0172] In a further aspect, the present invention relates to a product of a protein or substance essentially free of a biologically active substance of the invention, produced by a method of the present invention.

### Methods of Inhibiting Expression of a Polypeptide

[0173] The present invention also relates to methods of inhibiting the expression of a biological substance in a cell, comprising administering to the cell or expressing in the cell a double-stranded RNA (dsRNA) molecule, wherein the dsRNA comprises a subsequence of a polynucleotide of the present invention. In a preferred aspect, the dsRNA is about 15, 16, 17, 18, 19, 20, 21, 22, 23, 24, 25 or more duplex nucleotides in length.

[0174] The dsRNA is preferably a small interfering RNA (siRNA) or a micro RNA (miRNA). In a preferred aspect, the dsRNA is small interfering RNA (siRNAs) for inhibiting transcription. In another preferred aspect, the dsRNA is micro RNA (miRNAs) for inhibiting translation.

[0175] The present invention also relates to such double-stranded RNA (dsRNA) molecules, comprising a portion of the coding sequence of any of SEQ ID NOs: 2-4876 for inhibiting expression of a biological substance in a cell. While the present invention is not limited by any particular mechanism of action, the dsRNA can enter a cell and cause the degradation of a single-stranded RNA (ssRNA) of similar or identical sequences, including endogenous mRNAs. When a cell is exposed to dsRNA, mRNA from the homologous gene is selectively degraded by a process called RNA interference (RNAi).

[0176] The dsRNAs of the present invention can be used in gene-silencing therapeutics. In one aspect, the invention provides methods to selectively degrade RNA using the dsRNAis of the present invention. The process may be practiced in vitro, ex vivo or in vivo. In one aspect, the dsRNA molecules can be used to generate a loss-of-function mutation in a cell, an organ or an animal. Methods for making and using dsRNA molecules to selectively degrade RNA are well known in the art, see, for example, U.S. Pat. No. 6,506,559; U.S. Pat. No. 6,511,824; U.S. Pat. No. 6,515,109; and U.S. Pat. No. 6,489,127.

### Compositions

[0177] The present invention also relates to compositions comprising a biologically active substance of the present invention. Preferably, the compositions are enriched in the biologically active substance. The term “enriched” indicates that the biologically active substance of the composition has been increased, e.g., with an enrichment factor of 1.1

[0178] The composition may comprise a biologically active substance of the invention as the major component, e.g., a mono-component composition. Alternatively, the composition may comprise multiple biologically active substances, for example, multiple enzymes, such as an aminopeptidase, amylase, carbohydrase, carboxypeptidase, catalase, cellulase, chitinase, cutinase, cyclodextrin glycosyltransferase, deoxyribonuclease, esterase, alpha-galactosidase, beta-galactosidase, glucoamylase, alpha-glucosidase, beta-glucosidase, haloperoxidase, invertase, laccase, lipase, mannosidase, oxidase, pectinolytic enzyme, peptidoglutaminase, peroxidase, phytase, polyphenoloxidase, proteolytic enzyme, ribonuclease, transglutaminase, or xylanase.

[0179] The compositions may be prepared in accordance with methods known in the art and may be in the form of a liquid or a dry composition. For instance, the composition may be in the form of a granulate or a microgranulate. The biologically active substance to be included in the composition may be stabilized in accordance with methods known in the art.

Methods for Using the Bacillus licheniformis Chromosome

[0180] The present invention also relates to methods for using the Bacillus licheniformis chromosome.

[0181] The chromosome of Bacillus licheniformis serves as a reservoir of useful genes/proteins that have environmental, energy, health, and industrial applications (e.g., enzymes, antibiotics, biochemicals). A clear extension of this is that the newly discovered molecules can be used as starting points for further improvements via well-established gene shuffling, directed evolution, and protein engineering methods. Additionally, regions or motifs (e.g., signal peptides, active sites, substrate-binding regions) from the newly discovered molecules may be employed to derive novel chimeras with industrially advantageous properties.

[0182] The 5′ and 3′ untranslated regions that are located upstream and downstream, respectively, of the chromosomal genes contain promoters, terminators, and other regulatory elements that control transcription and translation of the adjacent coding DNA sequences (CDSs). These elements may be used to construct novel vectors for efficient expression of homologous and heterologous genes in Bacillus licheniformis and other Bacillus species.

[0183] The chromosomal DNA sequence may be used for selecting integration sites for stable inheritance and expression of inserted vector constructs. These constructs may be targeted to specific chromosomal locations using homologous recombination between vector and chromosomal DNA molecules.

[0184] The genes encoded in the chromosome may be used for monitoring global gene expression during the life cycle of the organism or during industrial fermentations (e.g., implemented on DNA microarrays). By monitoring global gene expression, for example, improved processes for industrial fermentation can be implemented with greater efficiency and economy.

[0185] The genes of Bacillus licheniformis SJ1904 may be employed to improve industrial fermentation strains via selective breeding, conjugative mating, bacteriophage-mediated transduction, and DNA-mediated transformation. In addition, the chromosome of Bacillus licheniformis SJ1904 may be useful, in whole or in part, to construct new microbial cell factories via synthetic biology approaches (Danchin, A. 2004. The bag or the spindle: the cell factory at the time of systems' biology. Microb. Cell Fact. 3: 13).

[0186] The chromosome is useful in comparative evolutionary and ecological studies. For example, dozens of Bacillus licheniformis isolates can be readily compared on a global scale by hybridization of their genomic DNAs to a microarray fabricated from the reference strain presented herein (so-called comparative genomic hybridization). Using this method, one can compare various isolates to look for similarities/differences among geographical and environmental niches or among biocontrol strains versus saprophytic isolates.

[0187] The chromosome sequence may be used to construct the metabolic blueprint for Bacillus licheniformis that includes all catabolic and anabolic pathways, signaling pathways, regulatory networks, growth substrates, biochemical intermediates, end products, electron donors/acceptors and others. In doing so, it is possible to modify the metabolic machinery of the organism by deleting unwanted pathways and/or adding enzymes/pathways from other organisms to generate useful chemicals and intermediates.

[0188] The pathways and components that contribute to production of extracellular and surface proteins in Bacillus licheniformis can be extracted from the chromosomal sequence. This affords opportunities for improved production of extracellular proteins by genetic manipulation of the secretion machinery.

[0189] The chromosome data allows deduction of the essential genes for Bacillus licheniformis (either by comparison to related bacteria such as Bacillus subtilis or by systematic gene-by-gene knock outs). Thus it has become possible to design custom-made strains that contain only the genes that are essential for production of specific proteins or metabolites (so-called cell factory concept).

[0190] The chromosome data may be used to construct interspecies hybrids between Bacillus licheniformis and other bacteria. Venter et al., 2003, Proc. Nat. Acad. Sci. USA 100, 15440-15445 have shown that it is possible to construct an entire virus genome from smaller DNA segments. Thus, segments of the Bacillus licheniformis chromosome may be employed to derive novel chromosomal segments or even entire chimeric chromosomes for specific applications.

[0191] In a preferred aspect, methods for using the Bacillus licheniformis chromosome include host improvement, e.g., secretion of a protein or metabolite, genome shuffling, construction of new genomes, metabolic engineering and pathway reconstruction, carrier for heterologous expression vectors, microarrays as described herein, identification of polypeptides in proteomics analyses, and comparative genomics with other Bacillus species or related organisms.

### Methods for Isolating Genes

[0192] The present invention also relates to methods for isolating a polynucleotide encoding a biologically active substance from a microbial strain. The method comprises first the addition of a mixture of first labeled nucleic acid probes, isolated from a microbial strain cultured on medium without an inducing substrate, and a mixture of second labeled nucleic acid probes, isolated from the microbial strain cultured on medium with the inducing substrate, to an array of Bacillus licheniformis polynucleotides selected from the group consisting of the polynucleotides of SEQ ID NOs: 2-4876, full-length complementary strands of SEQ ID NOs: 2-4876, and fragments of SEQ ID NOs: 2-4876, under conditions where the labeled nucleic acid probes hybridize to complementary sequences of the Bacillus licheniformis polynucleotides on the array. The first nucleic acid probes are labeled with a first reporter and the second nucleic acid probes are labeled with a second reporter. The array is then examined under conditions wherein the relative expression of the genes of the microbial strain is determined by the observed hybridization reporter signal of each spot on the array in which (i) the Bacillus licheniformis polynucleotides on the array that hybridize to the first nucleic acid probes produce a distinct first hybridization reporter signal or to the second nucleic acid probes produce a distinct second hybridization reporter signal, and (ii) the Bacillus licheniformis polynucleotides on the array that hybridize to both the first and second nucleic acid probes produce a distinct combined hybridization reporter signal. The probe is then sequenced to isolate from the microbial strain the corresponding gene that encodes an enzyme that degrades or converts the substrate.

[0193] Enzymes. The gene of interest may encode any enzyme including an oxidoreductase, transferase, hydrolase, lyase, isomerase, or ligase. In a preferred aspect, the enzyme is an acylase, alpha-glucosidase, amidase, aminopeptidase, amylase, carbohydrase, carboxypeptidase, catalase, cellulase, chitinase, cutinase, cyclodextrin glycosyltransferase, deoxyribonuclease, dextrinase, endoglucanase, esterase, galactanase, alpha-galactosidase, beta-galactosidase, glucoamylase, glucanase, glucocerebrosidase, alpha-glucosidase, beta-glucosidase, hemicellulase, invertase, laccase, lignase, lipase, lysin, mannosidase, mutanase, oxidase, pectinolytic enzyme, peroxidase, phosphatase, phospholipase, phytase, polyphenoloxidase, proteolytic enzyme, pullulanase, ribonuclease, transglutaminase, urokinase, or xylanase.

[0194] Inducing Substrate. The inducing substrate may be any substrate that is subject to the action of an enzyme, i.e., that degrades or converts the substrate. In a preferred aspect, the inducing substrate is lignin or a lignin-containing material. In a more preferred aspect, the lignin-containing material is lignocellulose. In another preferred aspect, the inducing substrate is cellulose. In another preferred aspect, the inducing substrate is hemicellulose. In another preferred aspect, the inducing substrate is pectin. In another preferred aspect, the inducing substrate is a lipid. In another preferred aspect, the inducing substrate is phospholipid. In another preferred aspect, the inducing substrate is phytic acid. In another preferred aspect, the inducing substrate is protein. In another preferred aspect, the inducing substrate is a starch. In another preferred aspect, the inducing substrate is a medium that is low in nutrients such as amino acids, carbon, nitrogen, phosphate, or iron.

[0195] In a more preferred aspect, the protein substrate is blood, casein, egg, gelatin, gluten, milk protein, or soy protein. In another more preferred aspect, the lignin-containing material is hardwood thermomechanical pulp. In another more preferred aspect, the lignocellulose is corn stover. In another more preferred aspect, the lignocellulose is white poplar. In another more preferred aspect, the lignocellulose is rice straw. In another more preferred aspect, the lignocellulose is switch grass.

[0196] Microbial Strains. In the methods of the present invention, the microbial strain may be any microbial strain. The strain is cultured on a suitable nutrient medium with and without a substrate of interest. The strain cultured on medium without the substrate is used as a reference for identifying differences in expression of the same or similar complement of genes in the strain cultured on medium with substrate. The strain may be a wild-type, mutant, or recombinant strain.

[0197] In the methods of the present invention, the microbial strain is preferably a bacterium. In a more preferred aspect, the bacterium is a Bacillus, Pseudomonas, Streptococcus, or Streptomyces strain or E. coli.

[0198] The Bacillus strain may be any Bacillus strain. In a preferred aspect, the Bacillus strain is Bacillus alkalophilus, Bacillus amyloliquefaciens, Bacillus brevis, Bacillus cereus, Bacillus circulans, Bacillus clausii, Bacillus coagulans, Bacillus fastidiosus, Bacillus firmus, Bacillus lautus, Bacillus lentus, Bacillus licheniformis, Bacillus macerans, Bacillus megaterium, Bacillus methanolicus, Bacillus pumilus, Bacillus sphaericus, Bacillus stearothermophilus, Bacillus subtilis, or Bacillus thuringiensis. It will be understood that the term “Bacillus” also encompasses relatives of Bacillus such as Paenibacillus, Oceanobacillus, and the like.

[0199] The Pseudomonas strain may be any Pseudomonas strain. In a preferred aspect, the Pseudomonas strain is Pseudomonas acidovorans, Pseudomonas aeruginosa, Pseudomonas alcaligenes, Pseudomonas anguilliseptica, Pseudomonas abtimicrobica, Pseudomonas aurantiaca, Pseudomonas aureofaciens, Pseudomonas beijerinckii, Pseudomonas boreopolis, Pseudomonas chlororaphis, Pseudomonas citronellolis, Pseudomonas cocovenenans, Pseudomonas diminuta, Pseudomonas doudoroffii, Pseudomonas echinoides, Pseudomonas elongate, Pseudomonas fluorescens, Pseudomonas fragi, Pseudomonas halophobica, Pseudomonas huttiensis, Pseudomonas indigofera, Pseudomonas lanceolate, Pseudomonas lemoignei, Pseudomonas lundensis, Pseudomonas mendocina, Pseudomonas mephitica, Pseudomonas mucidolens, Pseudomonas oleovorans, Pseudomonas phenazinium, Pseudomonas pictorium, Pseudomonas putida, Pseudomonas resinovorans, Pseudomonas saccharophila, Pseudomonas stanieri, Pseudomonas stutzeri, Pseudomonas taetrolens, or Pseudomonas vesicularis.

[0200] The Streptococcus strain may be any Streptococcus strain. In a preferred aspect, the Streptococcus strain is a Streptococcus equisimilis cell. In another preferred aspect, the Streptococcus strain is a Streptococcus pyogenes cell. In another preferred aspect, the Streptococcus strain is a Streptococcus uberis cell. In another preferred aspect, the Streptococcus strain is a Streptococcus equi subsp. Zooepidemicus cell.

[0201] The Streptomyces strain may be any Streptomyces strain. In a preferred aspect, the Streptomyces strain is a Streptomyces achromogenes cell. In another preferred aspect, the Streptomyces strain is a Streptomyces avermitilis cell. In another preferred aspect, the Streptomyces strain is a Streptomyces coelicolor cell. In another preferred aspect, the Streptomyces strain is a Streptomyces griseus cell. In a preferred aspect, the Streptomyces strain is Streptomyces lividans. In another preferred aspect, the Streptomyces strain is Streptomyces murinus.

[0202] Microarrays. The term “an array of Bacillus licheniformis polynucleotides” is defined herein as a linear or two-dimensional array of preferably discrete elements of an array of Bacillus licheniformis polynucleotides selected from the group consisting of SEQ ID NOs: 2-4876, full-length complementary strands of SEQ ID NOs: 2-4876, and fragments of SEQ ID NOs: 2-4876 (e.g., synthetic oligonucleotides of, for example, 20-60 nucleotides), wherein each discrete element has a finite area, formed on the surface of a solid support. It is understood herein that the term “Bacillus licheniformis polynucleotides” encompasses the polynucleotides of SEQ ID NOs: 2-4876, full-length complementary strands of SEQ ID NOs: 2-4876, and fragments of SEQ ID NOs: 2-4876.

[0203] The term “microarray” is defined herein as an array of Bacillus licheniformis polynucleotide elements having a density of discrete of Bacillus licheniformis polynucleotide elements of at least about 100/cm², and preferably at least about 1000/cm². The Bacillus licheniformis polynucleotide elements in a microarray have typical dimensions, e.g., diameters, in the range of between about 10 to about 250 μm, preferably in the range of between about 10 to about 200 μm, more preferably in the range of between about 20 to about 150 μm, even more preferably in the range of between about 20 to about 100 μm, most preferably in the range of between about 50 to about 100 μm, and even most preferably in the range of between about 80 to about 100 μm, and are separated from other polynucleotide elements in the microarray by about the same distance.

[0204] Methods and instruments for forming microarrays on the surface of a solid support are well known in the art. See, for example, U.S. Pat. No. 5,807,522; U.S. Pat. No. 5,700,637; and U.S. Pat. No. 5,770,151. The instrument may be an automated device such as described in U.S. Pat. No. 5,807,522.

[0205] The term “a substrate containing an array of Bacillus licheniformis polynucleotides” is defined herein as a solid support having deposited on the surface of the support one or more (several) of a plurality of Bacillus licheniformis polynucleotides, as described herein, for use in detecting binding of labeled nucleic acids to the Bacillus licheniformis polynucleotides.

[0206] The substrate may, in one aspect, be a glass support (e.g., glass slide) having a hydrophilic or hydrophobic coating on the surface of the support, and an array of distinct random nucleic acid fragments bound to the coating, where each distinct random nucleic acid fragment is disposed at a separate, defined position.

[0207] Each microarray in the substrate preferably contains at least 10³ distinct Bacillus licheniformis in a surface area of less than about 5 or 6 cm². Each distinct Bacillus licheniformis polynucleotide (i) is disposed at a separate, defined position on the array, (ii) has a length of at least 50 bp, and (iii) is present in a defined amount between about 0.1 femtomoles and 100 nanomoles or higher if necessary.

[0208] For a hydrophilic coating, the glass slide is coated by placing a film of a polycationic polymer with a uniform thickness on the surface of the slide and drying the film to form a dried coating. The amount of polycationic polymer added should be sufficient to form at least a monolayer of polymers on the glass surface. The polymer film is bound to the surface via electrostatic binding between negative silyl-OH groups on the surface and charged cationic groups in the polymers. Such polycationic polymers include, but are not limited to, polylysine and polyarginine.

[0209] Another coating strategy employs reactive aldehydes to couple DNA to the slides (Schena et al., 1996, Proceedings of the National Academy of Science USA 93: 10614-10619; Heller at al., 1997, Proceedings of the National Academy of Science USA 94: 2150-2155).

[0210] Alternatively, the surface may have a relatively hydrophobic character, i.e., one that causes aqueous medium deposited on the surface to bead. A variety of known hydrophobic polymers, such as polystyrene, polypropylene, or polyethylene, have desirable hydrophobic properties, as do glass and a variety of lubricant or other hydrophobic films that may be applied to the support surface. A support surface is “hydrophobic” if an aqueous droplet applied to the surface does not spread out substantially beyond the area size of the applied droplet, wherein the surface acts to prevent spreading of the droplet applied to the surface by hydrophobic interaction with the droplet.

[0211] In another aspect, the substrate may be a multi-cell substrate where each cell contains a microarray of Bacillus licheniformis and preferably an identical microarray, formed on a porous surface. For example, a 96-cell array may typically have array dimensions between about 12 and 244 mm in width and 8 and 400 mm in length, with the cells in the array having width and length dimension of 1/12 and ⅛ the array width and length dimensions, respectively, i.e., between about 1 and 20 in width and 1 and 50 mm in length.

[0212] The solid support may include a water-impermeable backing such as a glass slide or rigid polymer sheet, or other non-porous material. Formed on the surface of the backing is a water-permeable film, which is formed of porous material. Such porous materials include, but are not limited to, nitrocellulose membrane nylon, polypropylene, and polyvinylidene difluoride (PVDF) polymer. The thickness of the film is preferably between about 10 and 1000 μm. The film may be applied to the backing by spraying or coating, or by applying a preformed membrane to the backing.

[0213] Alternatively, the solid support may be simply a filter composed of nitrocellulose, nylon, polypropylene, or polyvinylidene difluoride (PVDF) polymer, or, for that matter, any material suitable for use.

[0214] The film surface may be partitioned into a desirable array of cells by water-impermeable grid lines typically at a distance of about 100 to 2000 μm above the film surface. The grid lines can be formed on the surface of the film by laying down an uncured flowable resin or elastomer solution in an array grid, allowing the material to infiltrate the porous film down to the backing, and then curing the grid lines to form the cell-array substrate.

[0215] The barrier material of the grid lines may be a flowable silicone, wax-based material, thermoset material (e.g., epoxy), or any other useful material. The grid lines may be applied to the solid support using a narrow syringe, printing techniques, heat-seal stamping, or any other useful method known in the art.

[0216] Each well preferably contains a microarray of distinct Bacillus licheniformis polynucleotides. “Distinct Bacillus licheniformis polynucleotides” as applied to the polynucleotides forming a microarray is defined herein as an array member that is distinct from other array members on the basis of a different Bacillus licheniformis polynucleotide sequence or oligo sequence thereof, and/or different concentrations of the same or distinct Bacillus licheniformis polynucleotides and/or different mixtures of distinct Bacillus licheniformis polynucleotides or different-concentrations of Bacillus licheniformis polynucleotides. Thus an array of “distinct Bacillus licheniformis polynucleotides” may be an array containing, as its members, (i) distinct Bacillus licheniformis genes that may have a defined amount in each member, (ii) different, graded concentrations of a specific Bacillus licheniformis polynucleotide, and/or (iii) different-composition mixtures of two or more distinct Bacillus licheniformis polynucleotides.

[0217] It will be understood, however, that in the methods of the present invention, any type of substrate known in the art may be used.

[0218] The delivery of a known amount of a selected Bacillus licheniformis polynucleotide to a specific position on the support surface is preferably performed with a dispensing device equipped with one or more (several) tips for insuring reproducible deposition and location of the Bacillus licheniformis polynucleotides and for preparing multiple arrays. Any dispensing device known in the art may be used in the methods of the present invention. See, for example, U.S. Pat. No. 5,807,522.

[0219] For liquid-dispensing on a hydrophilic surface, the liquid will have less of a tendency to bead, and the dispensed volume will be more sensitive to the total dwell time of the dispenser tip in the immediate vicinity of the support surface.

[0220] For liquid-dispensing on a hydrophobic surface, flow of fluid from the tip onto the support surface will continue from the dispenser onto the support surface until it forms a liquid bead. At a given bead size, i.e., volume, the tendency of liquid to flow onto the surface will be balanced by the hydrophobic surface interaction of the bead with the support surface, which acts to limit the total bead area on the surface, and by the surface tension of the droplet, which tends toward a given bead curvature. At this point, a given bead volume will have formed, and continued contact of the dispenser tip with the bead, as the dispenser tip is being withdrawn, will have little or no effect on bead volume.

[0221] The desired deposition volume, i.e., bead volume, formed is preferably in the range 2 μl (picoliters) to 2 nl (nanoliters), although volumes as high as 100 nl or more may be dispensed. It will be appreciated that the selected dispensed volume will depend on (i) the “footprint” of the dispenser tip(s), i.e., the size of the area spanned by the tip(s), (ii) the hydrophobicity of the support surface, and (iii) the time of contact with and rate of withdrawal of the tip(s) from the support surface. In addition, bead size may be reduced by increasing the viscosity of the medium, effectively reducing the flow time of liquid from the dispensing device onto the support surface. The drop size may be further constrained by depositing the drop in a hydrophilic region surrounded by a hydrophobic grid pattern on the support surface.

[0222] At a given tip size, bead volume can be reduced in a controlled fashion by increasing surface hydrophobicity, reducing time of contact of the tip with the surface, increasing rate of movement of the tip away from the surface, and/or increasing the viscosity of the medium. Once these parameters are fixed, a selected deposition volume in the desired picoliter to nanoliter range can be achieved in a repeatable fashion.

[0223] After depositing a liquid droplet of a Bacillus licheniformis polynucleotide sample at one selected location on a support, the tip may be moved to a corresponding position on a second support, the Bacillus licheniformis polynucleotide sample is deposited at that position, and this process is repeated until the random nucleic acid fragment sample has been deposited at a selected position on a plurality of supports.

[0224] This deposition process may then be repeated with another random nucleic acid fragment sample at another microarray position on each of the supports.

[0225] The diameter of each Bacillus licheniformis polynucleotide region is preferably between about 20-200 μm. The spacing between each region and its closest (non-diagonal) neighbor, measured from center-to-center, is preferably in the range of about 20-400 μm. Thus, for example, an array having a center-to-center spacing of about 250 μm contains about 40 regions/cm or 1,600 regions/cm². After formation of the array, the support is treated to evaporate the liquid of the droplet forming each region, to leave a desired array of dried, relatively flat Bacillus licheniformis polynucleotide or oligo thereof regions. This drying may be done by heating or under vacuum. The DNA can also be UV-crosslinked to the polymer coating.

[0226] Nucleic Acid Probes. In the methods of the present invention, the strains are cultivated in a nutrient medium with and without a substrate using methods well known in the art for isolation of nucleic acids to be used as probes. For example, the strains may be cultivated by shake flask cultivation, small-scale or large-scale fermentation (including continuous, batch, fed-batch, or solid state fermentations) in laboratory or industrial fermentors performed in a suitable medium. The cultivation takes place in a suitable nutrient medium comprising carbon and nitrogen sources and inorganic salts, using procedures known in the art. Suitable media are available from commercial suppliers or may be prepared according to published compositions (e.g., in catalogues of the American Type Culture Collection).

[0227] The nucleic acid probes from the microbial strains cultured on medium with and without substrate may be any nucleic acid including genomic DNA, cDNA, and RNA, and may be isolated using standard methods known in the art.

[0228] The populations of isolated nucleic acid probes may be labeled with detection reporters such as colorimetric, radioactive for example, ³²P, ³³P, or ³⁵S), fluorescent reporters, or other reporters using methods known in the art (Chen et al., 1998, Genomics 51: 313-324; DeRisi et al., 1997, Science 278: 680-686; U.S. Pat. No. 5,770,367).

[0229] In a preferred aspect, the probes are labeled with fluorescent reporters. For example, the DNA probes may be labeled during reverse transcription from the respective RNA pools by incorporation of fluorophores as dye-labeled nucleotides (DeRisi et al., 1997, supra), e.g., Cy5-labeled deoxyuridine triphosphate, or the isolated cDNAs may be directly labeled with different fluorescent functional groups. Fluorescent-labeled nucleotides include, but are not limited to, fluorescein conjugated nucleotide analogs (green fluorescence), lissamine nucleotide analogs (red fluorescence). Fluorescent functional groups include, but are not limited to, Cy3 (a green fluorescent dye) and Cy5 (red fluorescent dye).

[0230] Array Hybridization. The labeled nucleic acids from the two strains cultivated with and without substrate are then added to an array of Bacillus licheniformis polynucleotides under conditions where the nucleic acid pools from the two strains hybridize to complementary sequences of the Bacillus licheniformis polynucleotides on the array. For purposes of the present invention, hybridization indicates that the labeled nucleic acids from the two strains hybridize to the Bacillus licheniformis polynucleotides under very low to very high stringency conditions.

[0231] A small volume of the labeled nucleic acids mixture is loaded onto the substrate. The solution will spread to cover the entire microarray. In the case of a multi-cell substrate, one or more (several) solutions are loaded into each cell that stop at the barrier elements.

[0232] For nucleic acid probes of at least about 100 nucleotides in length, miroarray hybridization conditions described by Eisen and Brown, 1999, Methods of Enzymology 303: 179-205, may be used. Hybridization is conducted under a cover slip at 65° C. in 3×SSC for 4-16 hours followed by post-hybridization at room temperature after removal of the cover slip in 2×SSC, 0.1% SDS by washing the array two or three times in the solution, followed by successive washes in 1×SSC for 2 minutes and 0.2×SSC wash for two or more minutes.

[0233] Conventional conditions of very low to very high stringency conditions may also be used. Very low to very high stringency conditions are defined as prehybridization and hybridization at 42° C. in 5×SSPE, 0.3% SDS, 200 μg/ml sheared and denatured salmon sperm DNA, and either 25% formamide for very low and low stringencies, 35% formamide for medium and medium-high stringencies, or 50% formamide for high and very high stringencies, following standard Southern blotting procedures.

[0234] The carrier material is finally washed three times each for 15 minutes using 2×SSC, 0.2% SDS preferably at least at 45° C. (very low stringency), more preferably at least at 50° C. (low stringency), more preferably at least at 55° C. (medium stringency), more preferably at least at 60° C. (medium-high stringency), even more preferably at least at 65° C. (high stringency), and most preferably at least at 70° C. (very high stringency).

[0235] For shorter nucleic acid probes that are less than 50 nucleotides, microarray hybridization conditions described by Kane et al., 2000, Nucleic Acids Research 28: 4552-4557, may be used. Hybridization is conducted under a supported coverslip at 42° C. for 16-18 hours at high humidity in 50% formamide, 4.1×Denhardt's solution, 4.4×SSC, and 100 μg/ml of herring sperm DNA. Arrays are washed after removal of the coverslip in 4×SSC by immersion into 1×SSC, 0.1% SDS for 10 minutes, 0.1×SSC, 0.1% SDS twice for 10 minutes, and 0.1×SSC twice for 10 minutes.

[0236] For shorter nucleic acid probes that are about 50 nucleotides to about 100 nucleotides in length, conventional stringency conditions may be used. Such stringency conditions are defined as prehybridization, hybridization, and washing post-hybridization at 5° C. to 10° C. below the calculated Tₘ, using the calculation according to Bolton and McCarthy (1962, Proceedings of the National Academy of Sciences USA 48:1390) in 0.9 M NaCl, 0.09 M Tris-HCl pH 7.6, 6 mM EDTA, 0.5% NP-40, 1×Denhardt's solution, 1 mM sodium pyrophosphate, 1 mM sodium monobasic phosphate, 0.1 mM ATP, and 0.2 mg of yeast RNA per ml following standard Southern blotting procedures.

[0237] The carrier material is finally washed once in 6×SSC plus 0.1% SDS for 15 minutes and twice each for 15 minutes using 6×SSC at 5° C. to 10° C. below the calculated Tₘ.

[0238] The choice of hybridization conditions will depend on the degree of homology between the Bacillus licheniformis polynucleotides and the nucleic acid probes obtained from the strain cultured with and without inducing substrate. For example, where the nucleic acid probes and the Bacillus licheniformis polynucleotides are obtained from identical strains, high stringency conditions may be most suitable. Where the strains are from a genus or species different from which the Bacillus licheniformis polynucleotides were obtained, low or medium stringency conditions may be more suitable.

[0239] In a preferred aspect, the hybridization is conducted under low stringency conditions. In a more preferred aspect, the hybridization is conducted under medium stringency conditions. In a most preferred aspect, the hybridization is conducted under high stringency conditions.

[0240] The entire solid support is then reacted with detection reagents if needed and analyzed using standard colorimetric, radioactive, or fluorescent detection means. All processing and detection steps are performed simultaneously to all of the microarrays on the solid support ensuring uniform assay conditions for all of the microarrays on the solid support.

[0241] Detection. The most common detection method is laser-induced fluorescence detection using confocal optics (Cheung et al., 1998, Nat. Genet. 18: 225-230). The array is examined under fluorescence excitation conditions such that (i) the Bacillus licheniformis polynucleotides on the array that hybridize to the first nucleic acid probes obtained from the strain cultured without inducing substrate and to the second nucleic acid probes obtained from the strain cultured with inducing substrate produce a distinct first fluorescence emission color and a distinct second fluorescence emission color, respectively, and (ii) the Bacillus licheniformis polynucleotides on the array that hybridize to substantially equal numbers of nucleic acid probes obtained from the strain cultured without inducing substrate and from the strain cultured with inducing substrate produce a distinct combined fluorescence emission color; wherein the relative expression of the genes in the strains can be determined by the observed fluorescence emission color of each spot on the array.

[0242] The fluorescence excitation conditions are based on the selection of the fluorescence reporters. For example, Cy3 and Cy5 reporters are detected with solid state lasers operating at 532 nm and 632 nm, respectively.

[0243] However, other methods of detection well known in the art may be used such as standard photometric, colorimetric, or radioactive detection means, as described earlier.

[0244] Data Analysis. The data obtained from the scanned image may then be analyzed using any of the commercially available image analysis software. The software preferably identifies array elements, subtracts backgrounds, deconvolutes multi-color images, flags or removes artifacts, verifies that controls have performed properly, and normalizes the signals (Chen et al., 1997, Journal of Biomedical Optics 2: 364-374).

[0245] Several computational methods have been described for the analysis and interpretation of microarray-based expression profiles including cluster analysis (Eisen et al., 1998, Proc. Nat. Acad. Sci. USA 95: 14863-14868), paraMetric ordering of genes (Spellman et al., 1998, Mol. Biol. Ce119: 3273-3297), and supervised clustering methods based on representative hand-picked or computer-generated expression profiles (Chu et al., 1998. Science 282: 699-705). Preferred methods for evaluating the results of the microarrays employ statistical analysis to determine the significance of the differences in expression levels. In the methods of the present invention, the difference in the detected expression level is at least about 10% or greater, preferably at least about 20% or greater, more preferably at least about 50% or greater, even more preferably at least about 75% or greater; and most preferably at least about 100% or greater.

[0246] One such preferred system is the Significance Analysis of Microarrays (SAM) (Tusher et al., 2001, Proc. Natl. Acad. Sci. USA 98: 5116-5121). Statistical analysis allows the determination of significantly altered expression of levels of about 50% or even less. The PAM (or predictive analysis for microarrays) represents another approach for analyzing the results of the microarrays (Tibshirani et al., 2002, Proc. Natl. Acad. Sci. USA 99: 6567-6572).

[0247] Cluster algorithms may also be used to analyze microarray expression data. From the analysis of the expression profiles it is possible to identify co-regulated genes that perform common metabolic or biosynthetic functions. Hierarchical clustering has been employed in the analysis of microarray expression data in order to place genes into clusters based on sharing similar patterns of expression (Eisen et al., 1998, supra). This method yields a graphical display that resembles a kind of phylogenetic tree where the relatedness of the expression behavior of each gene to every other gene is depicted by branch lengths. The programs Cluster and TreeView, both written by Michael Eisen (Eisen et al., 1998 Proc. Nat. Acad. Sci. USA 95: 14863-14868) are freely available. Genespring is a commercial program available for such analysis (Silicon Genetics, Redwood City, Calif.).

[0248] Self-organizing maps (SOMs), a non-hierarchical method, have also been used to analyze microarray expression data (Tamayo et al., 1999, Proc. Natl. Acad. Sci. USA 96: 2907-2912). This method involves selecting a geometry of nodes, where the number of nodes defines the number of clusters. Then, the number of genes analyzed and the number of experimental conditions that were used to provide the expression values of these genes are subjected to an iterative process (20,000-50,000 iterations) that maps the nodes and data points into multidimensional gene expression space. After the identification of significantly regulated genes, the expression level of each gene is normalized across experiments. As a result, the expression profile of the genome is highlighted in a manner that is relatively independent of each gene's expression magnitude. Software for the “GENECLUSTER” SOM program for microarray expression analysis can be obtained from the Whitehead/MIT Center for Genome Research. SOMs can also be constructed using the GeneSpring software package.

[0249] Isolation of Genes. Probes containing genes or portions thereof identified to be induced by the present of substrate in the medium are characterized by determining the sequence of the probe. Based on the sequence, the gene can then be isolated using methods well known in the art.

[0250] The techniques used to isolate or clone a gene include isolation from genomic DNA, preparation from cDNA, or a combination thereof. The cloning of the gene from such genomic DNA can be effected, e.g., by using the well known polymerase chain reaction (PCR) or antibody screening of expression libraries to detect cloned DNA fragments with shared structural features. See, e.g., Innis et al., 1990, PCR: A Guide to Methods and Application, Academic Press, New York. Other nucleic acid amplification procedures such as ligase chain reaction (LCR), ligated activated transcription (LAT) and nucleic acid sequence-based amplification (NASBA) may be used. The gene may be cloned from the strain of interest, or another or related organism and thus, for example, may be a species variant of the gene.

### Methods for Monitoring Differential Expression of a Plurality of Genes

[0251] The present invention also relates to methods for monitoring differential expression of a plurality of genes in a first bacterial cell relative to expression of the same genes in one or more (several) second bacterial cells, comprising:

[0252] (a) adding a mixture of detection reporter-labeled nucleic acids isolated from the bacterial cells to a substrate containing an array of Bacillus licheniformis polynucleotides selected from the group consisting of SEQ ID NOs: 2-4876, full-length complementary strands of SEQ ID NOs: 2-4876, and fragments of SEQ ID NOs: 2-4876, under conditions where the detection reporter-labeled nucleic acids hybridize to complementary sequences of the Bacillus licheniformis polynucleotides on the array, wherein the nucleic acids from the first bacterial cell and the one or more (several) second bacterial cells are labeled with a first detection reporter and one or more (several) different second detection reporters, respectively; and

[0253] (b) examining the array under conditions wherein the relative expression of the genes in the bacterial cells is determined by the observed detection signal of each spot on the array in which (i) the Bacillus licheniformis polynucleotides on the array that hybridize to the nucleic acids obtained from either the first or the one or more (several) second bacterial cells produce a distinct first detection signal or one or more (several) second detection signals, respectively, and (ii) the Bacillus licheniformis polynucleotides on the array that hybridize to the nucleic acids obtained from both the first and one or more (several) second bacterial produce a distinct combined detection signal.

[0254] The methods of the present invention may be used to monitor global expression of a plurality of genes from a Bacillus cell, discover new genes, identify possible functions of unknown open reading frames, and monitor gene copy number variation and stability. For example, the global view of changes in expression of genes may be used to provide a picture of the way in which Bacillus cells adapt to changes in culture conditions, environmental stress, or other physiological provocation. Other possibilities for monitoring global expression include spore morphogenesis, recombination, metabolic or catabolic pathway engineering.

[0255] The methods of the present invention are particularly advantageous since one spot on an array equals one gene or open reading frame because extensive follow-up characterization is unnecessary since sequence information is available, and the Bacillus licheniformis microarrays can be organized based on function of the gene products.

[0256] Bacterial Cells. In the methods of the present invention, the two or more Bacillus cells may be any Bacillus cell where one of the cells is used as a reference for identifying differences in expression of the same or similar complement of genes in the other cell(s). In one aspect, the two or more cells are the same cell. For example, they may be compared under different growth conditions, e.g., oxygen limitation, nutrition, and/or physiology. In another aspect, one or more (several) cells are mutants of the reference cell. For example, the mutant(s) may have a different phenotype. In a further aspect, the two or more cells are of different species (e.g., Bacillus clausii and Bacillus subtilis). In another further aspect, the two or more cells are of different genera. In an even further aspect, one or more (several) cells are transformants of the reference cell, wherein the one or more (several) transformants exhibit a different property. For example, the transformants may have an improved phenotype relative to the reference cell and/or one of the other transformants. The term “phenotype” is defined herein as an observable or outward characteristic of a cell determined by its genotype and modulated by its environment. Such improved phenotypes may include, but are not limited to, improved secretion or production of a protein or compound, reduced or no secretion or production of a protein or compound, improved or reduced expression of a gene, desirable morphology, an altered growth rate under desired conditions, relief of over-expression mediated growth inhibition, or tolerance to low oxygen conditions.

[0257] The Bacillus cells may be any Bacillus cells, but preferably Bacillus alkalophilus, Bacillus amyloliquefaciens, Bacillus brevis, Bacillus cereus, Bacillus circulans, Bacillus clausii, Bacillus coagulans, Bacillus fastidiosus, Bacillus firmus, Bacillus lautus, Bacillus lentus, Bacillus licheniformis, Bacillus macerans, Bacillus megaterium, Bacillus methanolicus, Bacillus pumilus, Bacillus sphaericus, Bacillus stearothermophilus, Bacillus subtilis, or Bacillus thuringiensis cells.

[0258] In a preferred aspect, the Bacillus cells are Bacillus alkalophilus cells. In another preferred aspect, the Bacillus cells are Bacillus amyloliquefaciens cells. In another preferred aspect, the Bacillus cells are Bacillus brevis cells. In another preferred aspect, the Bacillus cells are Bacillus cereus cells. In another preferred aspect, the Bacillus cells are Bacillus circulans cells. In another preferred aspect, the Bacillus cells are Bacillus clausii cells. In another preferred aspect, the Bacillus cells are Bacillus coagulans cells. In another preferred aspect, the Bacillus cells are Bacillus fastidiosus cells. In another preferred aspect, the Bacillus cells are Bacillus firmus cells. In another preferred aspect, the Bacillus cells are Bacillus lautus cells. In another preferred aspect, the Bacillus cells are Bacillus lentus cells. In another preferred aspect, the Bacillus cells are Bacillus licheniformis cells. In another preferred aspect, the Bacillus cells are Bacillus macerans cells. In another preferred aspect, the Bacillus cells are Bacillus megaterium cells. In another preferred aspect, the Bacillus cells are Bacillus methanolicus cells. In another preferred aspect, the Bacillus cells are Bacillus pumilus cells. In another preferred aspect, the Bacillus cells are Bacillus sphaericus cells. In another preferred aspect, the Bacillus cells are Bacillus stearothermophilus cells. In another preferred aspect, the Bacillus cells are Bacillus subtilis cells. In another preferred aspect, the Bacillus cells are Bacillus thuringiensis cells.

[0259] In a more preferred aspect, the Bacillus cells are Bacillus licheniformis cells. In a most preferred aspect, the Bacillus licheniformis cells are Bacillus licheniformis SJ1904 cells.

[0260] In another more preferred aspect, the Bacillus cells are Bacillus clausii cells. In another most preferred aspect, the Bacillus clausii cells are Bacillus clausii NCIB 10309 cells.

[0261] It will be understood that the term “Bacillus” also encompasses relatives of Bacillus such as Paenibacillus, Oceanobacillus, and the like.

[0262] In the methods of the present invention, the cells are cultivated in a nutrient medium suitable for growth using methods well known in the art for isolation of the nucleic acids to be used as probes. For example, the cells may be cultivated by shake flask cultivation, small-scale or large-scale fermentation (including continuous, batch, fed-batch, or solid state fermentations) in laboratory or industrial fermentors performed in a suitable medium. The cultivation takes place in a suitable nutrient medium comprising carbon and nitrogen sources and inorganic salts, using procedures known in the art. Suitable media are available from commercial suppliers or may be prepared according to published compositions (e.g., in catalogues of the American Type Culture Collection).

[0263] Nucleic Acid Probes. The nucleic acid probes from the two or more Bacillus cells may be any nucleic acid including genomic DNA, cDNA, and RNA, and may be isolated using standard methods known in the art, as described herein. The populations of isolated nucleic acid probes may be labeled with colorimetric, radioactive, fluorescent reporters, or other reporters using methods described herein.

[0264] In a preferred aspect, the probes are labeled with fluorescent reporters, e.g., Cy3 (a green fluorescent dye) and Cy5 (red fluorescent dye), as described herein.

[0265] Array Hybridization. The labeled nucleic acids from the two or more Bacillus cells are then added to a substrate containing an array of Bacillus licheniformis polynucleotides under conditions, as described herein, where the nucleic acid pools from the two or more Bacillus cells hybridize to complementary sequences of the Bacillus licheniformis polynucleotides on the array.

[0266] Detection and Data Analysis. The same methods as described herein are used for detection and data analysis.

### Computer Readable Media and Computer-Based Systems

[0267] The Bacillus licheniformis chromosome and its polynucleotides (genes) described herein may be “provided” in a variety of media to facilitate their use. The term “provided” refers to a manufacture comprising an array of Bacillus licheniformis polynucleotides. Such manufactures provide the Bacillus licheniformis polynucleotides in a form that allows one skilled in the art to examine the manufacture using means not directly applicable to examining the chromosome or a subset thereof as it exists in nature or in purified form.

[0268] Thus, the present invention also relates to such a manufacture in the form of a computer readable medium comprising an array of Bacillus licheniformis polynucleotides selected from the group consisting of SEQ ID NOs: 2-4876, full-length complementary strands of SEQ ID NOs: 2-4876, and fragments of SEQ ID NOs: 2-4876.

[0269] In one application of this aspect, the Bacillus licheniformis polynucleotides of the present invention can be recorded on computer readable media. The term “computer readable media” is defined herein as any medium that can be read and accessed by a computer. Such computer readable media include, but are not limited to, magnetic storage media, e.g., floppy discs, hard disc storage medium, and magnetic tape; optical storage media, e.g., CD-ROM, DVD; electrical storage media, e.g., RAM and ROM; and hybrids of these categories, e.g., magnetic/optical storage media. One skilled in the art can readily appreciate how any of the presently known computer readable media can be used to create a manufacture comprising computer readable medium having recorded thereon a nucleotide sequence of the present invention. Likewise, it will be clear to those of skill how additional computer readable media that may be developed also can be used to create analogous manufactures having recorded thereon a nucleotide sequence of the present invention.

[0270] As used herein, “recorded” refers to a process for storing information on computer readable medium. One skilled in the art can readily adopt any of the presently known methods for recording information on computer readable medium to generate manufactures comprising the nucleotide sequence information of the present invention.

[0271] A variety of data storage structures are available for creating a computer readable medium having recorded thereon a nucleotide sequence of the present invention. The choice of the data storage structure will generally be based on the means chosen to access the stored information. In addition, a variety of data processor programs and formats can be used to store the nucleotide sequence information of the present invention on computer readable medium. The sequence information can be represented in a word processing text file, formatted in commercially-available software such as WordPerfect and Microsoft Word, or represented in the form of an ASCII file, stored in a database application, such as DB2, Sybase, Oracle, or the like. A skilled artisan can readily adapt any number of data-processor structuring formats (e.g., text file or database) in order to obtain computer readable medium having recorded thereon the nucleotide sequence information of the present invention.

[0272] Various computer software programs are publicly available that allow a skilled artisan to access sequence information provided in a computer readable medium. Thus, by providing in computer readable form an array of Bacillus licheniformis polynucleotides selected from the group consisting of SEQ ID NOs: 2-4876, full-length complementary strands of SEQ ID NOs: 2-4876, and fragments of SEQ ID NOs: 2-4876, enables one skilled in the art to routinely access the provided sequence information for a wide variety of purposes.

[0273] Software utilizing the BLAST (Altschul et al., 1990, supra), BLAZE (Brutlag et al., 1993, Comp. Chem. 17: 203-207), GENEMARK (Lukashin and Borodovsky, 1998, Nucleic Acids Research 26: 1107-1115), GENSCAN (Burge and Karlin, 1997, Journal of Molecular Biology 268: 78-94), GLIMMER (Salzberg et al., 1998, Nucleic Acids Research 26: 544-548), and GRAIL (Xu et al., 1994, Comput. Appl. Biosci. 10: 613-623) search algorithms may be used to identify open reading frames (ORFs) within a genome of interest, which contain homology to ORFs or proteins from both Bacillus licheniformis and Bacillus clausii and from other organisms. Among the ORFs discussed herein are protein encoding fragments of the Bacillus licheniformis and Bacillus clausii genomes useful in producing commercially important proteins, such as enzymes used in fermentation reactions and in the production of commercially useful metabolites.

[0274] The present invention further provides systems, particularly computer-based systems, which contain the sequence information described herein. Such systems are designed to identify, among other things, genes and gene products—many of which could be products themselves or used to genetically modify an industrial expression host through increased or decreased expression of a specific gene sequence(s).

[0275] The term “a computer-based system” is herein defined as the hardware means, software means, and data storage means used to analyze the nucleotide sequence information of the present invention. The minimum hardware means of the computer-based systems of the present invention comprises a central processing unit (CPU), input means, output means, and data storage means. One skilled in the art can readily appreciate that any currently available computer-based system is suitable for use in the present invention.

[0276] As stated above, the computer-based systems of the present invention comprise a data storage means having stored therein a nucleotide sequence of the present invention and the necessary hardware means and software means for supporting and implementing a search means.

[0277] The term “data storage means” is defined herein as memory that can store nucleotide sequence information of the present invention, or a memory access means that can access manufactures having recorded thereon the nucleotide sequence information of the present invention.

[0278] The term “search means” refers is defined herein as one or more (several) programs that are implemented on the computer-based system to compare a target sequence or target structural motif with the sequence information stored within the data storage means. Search means are used to identify fragments or regions of the present genomic sequences that match a particular target sequence or target motif. A variety of known algorithms are disclosed publicly and a variety of commercially available software for conducting search means are and can be used in the computer-based systems of the present invention. Examples of such software includes, but is not limited to, MacPattern (Fuchs, 1991, Comput. Appl. Biosci. 7: 105-106), BLASTN and BLASTX National Center for Biotechnology Information (NCBI). One skilled in the art can readily recognize that any one of the available algorithms or implementing software packages for conducting homology searches can be adapted for use in the present computer-based systems.

[0279] The term “target sequence” is defined here as any DNA (genomic DNA, cDNA) or amino acid sequence of six or more nucleotides or two or more amino acids. One skilled in the art can readily recognize that the longer a target sequence is, the less likely a target sequence will be present as a random occurrence in the database. The most preferred sequence length of a target sequence is from about 10 to 100 amino acids or from about 30 to 300 nucleotide residues. However, it is well recognized that searches for commercially important fragments, such as sequence fragments involved in gene expression and protein processing, may be of shorter length.

[0280] The term “a target structural motif” or “target motif” is defined herein as any rationally selected sequence or combination of sequences in which the sequence(s) are chosen based on a three-dimensional configuration that is formed upon the folding of the target motif. There are a variety of target motifs known in the art. Protein target motifs include, but are not limited to, enzyme active sites and signal sequences, substrate and cofactor binding domains, transmembrane domains, and sites for post-translational modifications. Nucleic acid target motifs include, but are not limited to, promoter sequences, hairpin structures and inducible expression elements (protein binding sequences), repeats, palindromes, dyad symmetries, and transcription and translation start and stop sites.

[0281] A variety of structural formats for the input and output means can be used to input and output the information in the computer-based systems of the present invention. A preferred format for an output means ranks fragments of the Bacillus licheniformis or Bacillus clausii genomic sequences possessing varying degrees of homology to the target sequence or target motif. Such presentation provides one skilled in the art with a ranking of sequences that contain various amounts of the target sequence or target motif and identifies the degree of homology contained in the identified fragment.

[0282] A variety of comparing means can be used to compare a target sequence or target motif with the data storage means to identify sequence fragments of the Bacillus licheniformis and Bacillus clausii genomes. For example, implementing software that utilize the BLAST and BLAZE algorithms, described in Altschul et al., 1990, supra, may be used to identify open reading frames within the Bacillus licheniformis or Bacillus clausii genome or the genomes of other organisms. A skilled artisan can readily recognize that any one of the publicly available homology search programs can be used as the search means for the computer-based systems of the present invention. Suitable proprietary systems that may be known to those of skill also may be employed in this regard.

### Codon Usage Table

[0283] The present invention further relates to methods for preparing a synthetic gene, comprising (a) generating a codon usage table based on codons used in one or more (several) open reading frames or portions thereof of SEQ ID NO: 1, (b) constructing a synthetic gene or portion thereof that contains in place of one or more (several) native codons one or more (several) preferred codons from the codon usage table, and (c) recovering the synthetic gene. In a preferred aspect, the codon usage table is Table 5. The Bacillus licheniformis chromosomal sequence of SEQ ID NO: 1 or portions thereof can be used to generate codon usage tables to design synthetic genes for their efficient heterologous expression in Bacillus licheniformis host cells. The codon usage tables can be based on (1) the codon used in all the open reading frames, (2) selected open reading frames, (3) fragments of the open reading frames, or (4) fragments of selected open reading frames. With a codon usage table, synthetic genes can be designed with only the most preferred codon for each amino acid; with a number of common codons for each amino acid; or with the same or a similar statistical average of codon usages found in the table of choice.

[0284] The synthetic gene can be constructed using any method such as site-directed mutagenesis or PCR generated mutagenesis in accordance with methods known in the art. Although, in principle, the modification may be performed in vivo, i.e., directly on the cell expressing the nucleotide sequence to be modified, it is preferred that the modification is performed in vitro.

[0285] The synthetic gene can be further modified by operably linking the synthetic gene to one or more (several) control sequences that direct the expression of the coding sequence in a suitable host cell under conditions compatible with the control sequences using the methods described herein. Nucleic acid constructs, recombinant expression vectors, and recombinant host cells comprising the synthetic gene can also be prepared using the methods described herein.

[0286] The present invention also relates to methods for producing a polypeptide encoded by such a synthetic gene comprising (a) cultivating a host cell comprising the synthetic gene under conditions conducive for production of the polypeptide; and (b) recovering the polypeptide.

[0287] The present invention is further described by the following examples that should not be construed as limiting the scope of the invention.

### EXAMPLES

### Example 1

### DNA Sequencing and Genome Assembly

[0288] The genome of Bacillus licheniformis SJ1904 was sequenced by a combination of the whole genome shotgun method described by Wilson, R. K. and Mardis, E. R., 1997, In Genome Analysis: A Laboratory Manual, Vol. 1, eds. Birren, B., Green, E. D., Meyers, R. M., and Roskams, J. (Cold Spring Harbor Press, Cold Spring Harbor, N.Y.), pp. 397-454, and by the highly parallel pyrosequencing method described by Margulies et al., 2005, Genome sequencing in microfabricated high-density picolitre reactors. Nature 437: 376-380.

[0289] Genomic DNA of Bacillus licheniformis SJ1904 was isolated using the following method: A single colony was used to inoculate 20 ml of LB broth (Davis, R. W., Botstein, D., and Roth, J. R. 1980, Advanced Bacterial Genetics, Cold Spring Harbor Press, Cold Spring Harbor, N.Y.) in a sterile 125 ml Erlenmeyer flask. The culture was incubated at 37° C. overnight with agitation at 240 rpm. The resulting cells were collected by centrifugation in a 45 ml screw-cap tube for 10 minutes at 6000×g, and the cell pellet was resuspended in 5 ml of Tris-glucose buffer (50 mM Tris-HCl, pH 8.0, 50 mM glucose, 10 mM EDTA). Lysozyme was added to a final concentration of 50 μg/ml and the suspension was incubated in a 37° C. water bath for 25 minutes. Next, 200 μl of 10% SDS was added and the tube was gently inverted several times. Five milliliters of a second detergent mixture (1% BRIJ®, 1% deoxycholate, 50 mM EDTA, pH 7.5) was added, and the tube was inverted several times while incubating for 20 minutes at room temperature. An equal volume of phenol:chloroform (1:1 v/v) was added and the tube was inverted gently at room temperature for 20-30 minutes. The tube was centrifuged for 20 minutes at 12,000×g, 4° C. The top aqueous layer was carefully removed with a wide-bore pipette and placed in a clean 45 ml screw-cap tube. The phenol; chloroform extraction was repeated and 1/10 volume of 3 M sodium acetate pH 5.2 was added to the aqueous layer. Two volumes of cold ethanol were carefully layered on top and the DNA was spooled from the solution onto a sterile glass rod. Spooled DNA was carefully rinsed in 70% ethanol and resuspended in a suitable amount of TE buffer (10 mM Tris-HCl, pH 8.0, 1 mM EDTA).

[0290] Plasmid libraries were constructed using randomly-sheared and Nhe I-digested genomic DNA that was enriched for 2-3 kb fragments by preparative agarose gel electrophoresis (Berka, R. M., Schneider, P., Golightly, E. J., Brown, S. H., Madden, M., Brown, K. M., Halkier, T., Mondorf, K., and Xu, F., 1997, Appl. Environ. Microbiol. 63: 3151-3157). Approximately 24,000 random clones were sequenced using dye-terminator chemistry (Applied Biosystems, Foster City, Calif.) with ABI 377, ABI 3700, and ABI 3130XL automated sequencers yielding approximately 2× coverage of the genome. For highly parallel pyrosequencing pools of random DNA fragments were generated by shearing genomic DNA and isolating single DNA molecules by limiting dilution (Margulies et al., 2005, supra). Overall sequencing coverage from this method was approximately 20×. High quality contigs were assembled from the raw pyrosequencing data using computer software described by Margulies et al. (2005).

[0291] A combination of methods was employed for gap closure including primer walking on selected clones, and PCR-amplified DNA fragments. Sequences from dye-terminator reactions were base-called using TraceTuner 2.0 (Paracel, Inc., Pasadena, Calif.) and assembled using Phrap (Gordon D., Abajian C., and Green P., 1998, Genome Res. 8: 195-202). Phrap, Crossmatch, and Consed were used for sequence finishing (Gordon D., Abajian C., and Green P., 1998, Genome Res. 8: 195-202).

### Example 2

### Identification and Annotation of Open Reading Frames (ORFs)

[0292] Protein coding regions in the assembled genome sequence data were identified using Glimmer version 3.0 (Delcher, A, L., Harmon, D., Kasif, S., White, O. and Salzberg, S. L., 1999, Nucleic Acids Res. 27, 4636-4641), and post-processed using TiCO version 2.0 (Tech M, Morgenstern B, and Meinicke P., 2006, Nucleic Acids Res. 34 (Web Server issue): W588-90). Predicted proteins were compared to the non-redundant database Uniref100 (Bairoch A, Apweiler R, Wu C H, Barker W C, Boeckmann B, Ferro S, Gasteiger E, Huang H, Lopez R, Magrane M, Martin M J, Natale D A, O′Donovan C, Redaschi N, Yeh L S. 2005. The Universal Protein Resource [UniProt]. Nucleic Acids Res. 33: D154-159) and the Bacillus subtilis genome (SubtilList) using BLASTP with an E-value threshold of 1×10⁻⁵. InterProScan version 3.3 with database release 13.0 was used to predict function (Zdobnov, E. M. and Apweiler, R., 2001, Bioinformatics 17, 847-848). The InterPro analysis included comparison to Pfam (Bateman, A., Coin, L., Durbin, R., Finn, R. D., Hollich, V., Griffiths-Jones, S., Khanna, A., Sonnhammer, E. L. et al., 2004, Nucleic Acids Res. 32, D138-D141), TIGRfam (Haft, D. J., Selengut, J. D. and White, O., 2003, Nucleic Acids Res. 31: 371-373), Interpro (Apweiler, R., Attwood, T. K., Bairock, A., Bateman, A., Birney, E., Biswas, M., Bucher, P., Cerutti, L., Corpet, F., Croning, M. D., et al., 2001, Nucleic Acids Res. 29: 37-40), signal peptide prediction using SignalP version 3.0 (Nielsen, H., Engelbrecht, J., Brunak, S., and von Heijne, G., 1997, Protein Engineering 10:1-6), and trans-membrane domain prediction using TMHMM version 2.0 (Krogh, A., Larsson, B., von Heijne, G. and Sonnhammer, E. L. L., 2000, J. Mol. Biol. 305, 567-580). These coding sequences (CDSs) were assigned to functional categories based on the Cluster of Orthologous Groups (COG) database (Tatusov, R. L., Natale, D. A., Garkavtsev, I. V., Tatusova, T. A., Shankavarum, U. T., Rao, B. S., Kiryutin, B., Galperin, M. Y., Federova, N. D., and Koonin, E. V. 2001. The COG database: new developments in phylogenetic classification of proteins from complete genomes. Nucleic Acids Res. 29: 22-28) with manual verification as described (Tatusov, R. L., Koonin, E. V. and Lipman, D. J., 1997, Science 278: 631-637; Koonin, E. V. and Galperin, M. Y., 2002, Sequence Evolution-Function: Computational Approaches in Comparative Genomics (Kluwer, Boston)). Transfer RNA genes were identified using tRNAscan-SE version 1.21 (Lowe, T. M. and Eddy, S. R., 1997, Nucleic Acids Res. 25: 955-964).

### Example 3

### General Features of the Bacillus licheniformis SJ1904 Genome

[0293] The genome of Bacillus licheniformis SJ1904 was determined to consist of a circular molecule of 4,345,159 by with an average % G+C content of 46.7% (Table 2). No plasmids were found during the genome analysis, and none were found by agarose gel electrophoresis.

[0294] Using a combination of several gene-finding algorithms, 4875 protein coding CDSs and pseudogenes with an average size of 789 by were identified. Among the predicted CDSs, 4225 (86%) have significant similarity (E≦1.0E-05) to proteins in Uniref100 (UniProt). The number of hypothetical and conserved hypothetical proteins in the Bacillus licheniformis SJ1904 genome with hits in the Uniref100 database was 1532. There are 650 CDSs that are unique to the genome of Bacillus licheniformis SJ1904 (no homologues found in the Uniref100 database). There are 72 tRNA genes representing all 20 amino acids and 7 rRNA operons.

[0295] The likely origin of replication was identified by homology to the corresponding region in the Bacillus licheniformis ATCC 14580 origin (Rey, M. W, Ramaiya, P, Nelson, B. A., Brody-Karpin, S. D., Zaretsky, E. J., Tang, M., Lopez de Leon, A., Xiang, H., Gusti, V., Clausen, I. G., Olsen, P. B., Rasmussen, M. D., Andersen, J. T., Jorgensen, P. L., Larsen, T. S., Sorokin, A., Bolotin, A., Lapidus, A., Galleron, N., Ehrlich, S. D., and Berka, R. M., 2004, Complete genome sequence of the industrial bacterium Bacillus licheniformis and comparisons with closely related Bacillus species. Genome Biol. 5: R77).

[0296] Extracellular proteins: In the Bacillus licheniformis genome, 625 of the 4875 gene models have signal peptides as forecasted by SignalP version 3.0 (Identification of prokaryotic and eukaryotic signal peptides and prediction of their cleavage sites. Henrik Nielsen, Jacob Engelbrecht, Soren Brunak and Gunnar von Heijne, 1997, Protein Engineering 10:1-6) and/or PSORTb version 2.0 (J. L. Gardy, M. R. Laird, F. Chen, S. Rey, C. J. Walsh, M. Ester, and F. S. L. Brinkman (2005) PSORTb v.2.0: expanded prediction of bacterial protein subcellular localization and insights gained from comparative proteome analysis, Bioinformatics 21: 617-623). Of these, 304 either have no trans-membrane domain as predicted with TMHMM version 2.0 (A. Krogh, B. Larsson, G. von Heijne, and E. L. L. Sonnhammer, 2000, Journal of Molecular Biology 305: 567-580) or a possible transmembrane domain that overlaps a predicted signal peptide. Based on manual examination, 204 were determined to encode probable secreted proteins and enzymes. Of these 78 (38%) are hypothetical or conserved hypothetical proteins. The sequence ID numbers for each of these genes encoding likely extracellular proteins are listed in Table 4.

[0297] Genes found in Bacillus licheniformis SJ1904 that are not predicted in Bacillus licheniformis ATCC 14580: There are 673 gene models in the Bacillus licheniformis SJ1904 chromosome that were not predicted in the Bacillus licheniformis ATCC 14580 chromosome data (GENBANK® accession number CP000002). The vast majority of the Bacillus licheniformis SJ1904 specific gene models encode hypothetical proteins of unknown or unassigned function (see Table 3). Among those gene models that share similarity to protein sequences in the UniRef100 database, most encode functions that can be ascribed to bacteriophages, transposons, and other mobile genetic elements.

### Example 4

### Codon Usage Table

[0298] The evolution of codon bias, the unequal usage of synonomous codons, is thought to be due to natural selection for the use of preferred codons that match the most abundant species of isoaccepting tRNAs, resulting in increased translational efficiency and accuracy. The practical applications for utilizing codon bias information include optimizing expression of heterologous and mutant genes (Jiang and Mannervik, 1999, Protein Expression and Purification 15: 92-98), site-directed mutagenesis to derive variant polypeptides from a given gene (Wong et al., 1995, J. Immunol. 154: 3351-3358; Kaji, H. et al., 1999, J. Biochem. 126: 769-775), design and synthesis of synthetic genes (Libertini and Di Donato, 1992, Protein Engineering 5: 821-825; Feng et al., 2000, Biochem. 39: 15399-15409), and fine-tuning or reducing of translation efficiency of specific genes by introduction of non-preferred codons (Crombie et al., 1992, J. Mol. Biol. 228: 7-12; Carlini and Stephan, 2003, Genetics 163: 239-243).

[0299] A codon usage table (Table 5) was generated from SEQ ID NO: 1 with Artemis, a software package created by the Wellcome Trust Sanger Institute (K. Rutherford, J. Parkhill, J. Crook, T. Horsnell, P. Rice, M-A. Rajandream and B. Barrell. 2000. Artemis: sequence visualisation and annotation. Bioinformatics 16: 944-945) on all the predicted protein-coding genes of the Bacillus licheniformis SJ1904 chromosome. Artemis read the coding sequences and calculated the Codon frequency table shown in Table 5. The codon usage data presented in Table 5 comprises the collective frequencies of each codon among the 4875 protein-coding gene models. Some noteworthy observations include (a) CTA and AGT codons are used infrequently, and (b) in several instances where two codon alternatives exist (e.g., Asp, Glu, Phe and Lys), codons with an A or T in the wobble position are preferred.

TABLE 1
Predicted functions

| SEQ ID | Gene Name & Product | Uniref100 Hit Description | Uniref100 Accession | Hit Organism |
|---|---|---|---|---|
| 2 | dnaA DnaA | Hypothetical protein dnaA [Bacillus licheniformis DSM 13] | UniRef100_Q65PM2 | Bacillus licheniformis DSM 13 |
| 3 | dnaN DNA polymerase III (beta subunit) | DnaN [Bacillus licheniformis DSM 13] | UniRef100_Q65PM1 | Bacillus licheniformis DSM 13 |
| 4 | yaaA conserved protein YaaA | YaaA [Bacillus licheniformis DSM 13] | UniRef100_Q65PM0 | Bacillus licheniformis DSM 13 |
| 5 | recF DNA repair RecF | Hypothetical protein recF [Bacillus licheniformis DSM 13] | UniRef100_Q65PL9 | Bacillus licheniformis DSM 13 |
| 6 | yaaB YaaB | Hypothetical protein yaaB [Bacillus licheniformis DSM 13] | UniRef100_Q65PL8 | Bacillus licheniformis DSM 13 |
| 7 | gyrB DNA gyrase (subunit B) | DNA gyrase [Bacillus licheniformis DSM 13] | UniRef100_Q630A8 | Bacillus licheniformis DSM 13 |
| 8 | gyrA DNA gyrase (subunit A) | DNA gyrase subunit A [Bacillus licheniformis] | UniRef100_Q65PL6 | Bacillus licheniformis |
| 9 | yaaC conserved protein YaaC | YaaC [Bacillus licheniformis DSM 13] | UniRef100_Q65PL5 | Bacillus licheniformis DSM 13 |
| 10 | guaB inosine-monophosphate dehydrogenase | GuaB [Bacillus licheniformis DSM 13] | UniRef100_Q65PL4 | Bacillus licheniformis DSM 13 |
| 11 | dacA D-alanyl-D-alanine carboxypeptidase (penicillin- | DacA [Bacillus licheniformis DSM 13] | UniRef100_Q65PL3 | Bacillus licheniformis DSM 13 |
| | binding protein 5) | | | |
| 12 | pdx1 Vitamin B6 biosynthesis protein | YaaD [Bacillus licheniformis DSM 13] | UniRef100_Q65PL2 | Bacillus licheniformis DSM 13 |
| 13 | pdxT SNO glutamine amidotransferase | YaaE [Bacillus licheniformis DSM 13] | UniRef100_Q65PL1 | Bacillus licheniformis DSM 13 |
| 14 | serS seryl-tRNA synthetase | SerS [Bacillus licheniformis DSM 13] | UniRef100_Q65PL0 | Bacillus licheniformis DSM 13 |
| 15 | glxK Glycerate kinase GlxK | Glycerate kinase [Bacillus licheniformis DSM 13] | UniRef100_Q630A0 | Bacillus licheniformis DSM 13 |
| 16 | BLP00015 Putative gluconate transporter | YojA [Bacillus licheniformis DSM 13] | UniRef100_Q65PK9 | Bacillus licheniformis DSM 13 |
| 17 | BLP00016 Putative sugar diacid recognition protein | YsfB [Bacillus licheniformis DSM 13] | UniRef100_Q65PK8 | Bacillus licheniformis DSM 13 |
| 18 | BLP00017 conserved Hypothetical Heavy metal | Hypothetical protein [Bacillus licheniformis DSM 13] | UniRef100_Q65PK7 | Bacillus licheniformis DSM 13 |
| | transport_detoxification protein | | | |
| 19 | dck deoxyadenosine_deoxycytidine kinase | Dck [Bacillus licheniformis DSM 13] | UniRef100_Q65PK6 | Bacillus licheniformis DSM 13 |
| 20 | dgk deoxyguanosine kinase | Dgk [Bacillus licheniformis DSM 13] | UniRef100_Q65PK5 | Bacillus licheniformis DSM 13 |
| 21 | yaaH Glycoside hydrolase, family 18, YaaH | YdhD [Bacillus licheniformis DSM 13] | UniRef100_Q65PK4 | Bacillus licheniformis DSM 13 |
| 22 | yaaI putative Isochorismatase hydrolase YaaI | YaaI [Bacillus licheniformis DSM 13] | UniRef100_Q65PK3 | Bacillus licheniformis DSM 13 |
| 23 | yaaJ putative Cytidine_deoxycytidylate deaminase, | YaaJ [Bacillus licheniformis DSM 13] | UniRef100_Q65PK2 | Bacillus licheniformis DSM 13 |
| | zinc-binding region YaaJ | | | |
| 24 | dnaX DNA polymerase III (gamma and tau subunits) | DnaX [Bacillus licheniformis DSM 13] | UniRef100_Q65PK1 | Bacillus licheniformis DSM 13 |
| 25 | yaaK conserved hypothetical YaaK | | | |
| 26 | recR DNA repair protein RecR | Hypothetical protein recR [Bacillus licheniformis DSM 13] | UniRef100_Q65PJ9 | Bacillus licheniformis DSM 13 |
| 27 | yaaL conserved hypothetical protein YaaL | Hypothetical protein yaaL [Bacillus licheniformis DSM 13] | UniRef100_Q65PJ8 | Bacillus licheniformis DSM 13 |
| 28 | bofA BofA | Hypothetical protein bofA [Bacillus licheniformis DSM 13] | UniRef100_Q65PJ7 | Bacillus licheniformis DSM 13 |
| 29 | csfB CsfB | Hypothetical protein csfB [Bacillus licheniformis DSM 13] | UniRef100_Q62ZY6 | Bacillus licheniformis DSM 13 |
| 30 | xpaC XpaC | Hypothetical protein xpaC [Bacillus licheniformis DSM 13] | UniRef100_Q65PJ6 | Bacillus licheniformis DSM 13 |
| 31 | yaaN putative Toxic anion resistance protein YaaN | YaaN [Bacillus licheniformis DSM 13] | UniRef100_Q65PJ5 | Bacillus licheniformis DSM 13 |
| 32 | yaaO putative Orn_Lys_Arg decarboxylase, C- | YaaO [Bacillus licheniformis DSM 13] | UniRef100_Q65PJ4 | Bacillus licheniformis DSM 13 |
| | terminal YaaO | | | |
| 33 | tmk thymidylate kinase | Tmk [Bacillus licheniformis DSM 13] | UniRef100_Q65PJ3 | Bacillus licheniformis DSM 13 |
| 34 | yaaQ YaaQ | Hypothetical protein yaaQ [Bacillus licheniformis DSM 13] | UniRef100_Q65PJ2 | Bacillus licheniformis DSM 13 |
| 35 | yaaR conserved hypothetical protein YaaR | YaaR [Bacillus licheniformis DSM 13] | UniRef100_Q65PJ1 | Bacillus licheniformis DSM 13 |
| 36 | holB DNA polymerase III (delta′ subunit) | HolB [Bacillus licheniformis DSM 13] | UniRef100_Q65PJ0 | Bacillus licheniformis DSM 13 |
| 37 | yaaT putative signal peptidase II YaaT | YaaT [Bacillus licheniformis DSM 13] | UniRef100_Q65PI9 | Bacillus licheniformis DSM 13 |
| 38 | yabA DnaA and DnaN interacting protein containing | Hypothetical protein yabA [Bacillus licheniformis DSM 13] | UniRef100_Q65PI8 | Bacillus licheniformis DSM 13 |
| | domain DUF972-YabA | | | |
| 39 | yabB conserved hypothetical protein containing SAM | YabB (SAM (And some other nucleotide) binding motif) | UniRef100_Q65PI7 | Bacillus licheniformis DSM 13 |
| | (and some other nucleotide) binding motif YabB | [Bacillus licheniformis DSM 13] | | |
| 40 | yazA putative Excinuclease ABC, C subunit, N- | YazA [Bacillus licheniformis DSM 13] | UniRef100_Q65PI6 | Bacillus licheniformis DSM 13 |
| | terminal YazA | | | |
| 41 | yabC putative methyltransferase YabC containing | YabC [Bacillus licheniformis DSM 13] | UniRef100_Q65PI5 | Bacillus licheniformis DSM 13 |
| | domain UPF0011 | | | |
| 42 | abrB transcriptional regulator AbrB | AbrB [Bacillus licheniformis DSM 13] | UniRef100_Q65PI4 | Bacillus licheniformis DSM 13 |
| 43 | metS methionyl-tRNA synthetase MetS | MetS [Bacillus licheniformis DSM 13] | UniRef100_Q65PI3 | Bacillus licheniformis DSM 13 |
| 44 | yabD putative TatD-related deoxyribonuclease YabD | YabD [Bacillus licheniformis DSM 13] | UniRef100_Q65PI2 | Bacillus licheniformis DSM 13 |
| 45 | yabE conserved hypothetical containing domain | YabE [Bacillus licheniformis DSM 13] | UniRef100_Q65PI1 | Bacillus licheniformis DSM 13 |
| | DUF348 YabE | | | |
| 46 | mmV ribonuclease M5 | RnmV [Bacillus licheniformis DSM 13] | UniRef100_Q65PI0 | Bacillus licheniformis DSM 13 |
| 47 | ksgA dimethyladenosine transferase | KsgA [Bacillus licheniformis DSM 13] | UniRef100_Q65PH9 | Bacillus licheniformis DSM 13 |
| 48 | yabG spore coat assembly Peptidase U57, YabG | Peptidase U57, YabG [Bacillus licheniformis DSM 13] | UniRef100_Q65PH8 | Bacillus licheniformis DSM 13 |
| 49 | veg Veg | Hypothetical protein veg [Bacillus licheniformis DSM 13] | UniRef100_Q65PH7 | Bacillus licheniformis DSM 13 |
| 50 | BLP04682 hypothetical protein | | | |
| 51 | sspF small acid-soluble spore protein (alpha_beta- | SspF [Bacillus licheniformis DSM 13] | UniRef100_Q65PH6 | Bacillus licheniformis DSM 13 |
| | type SASP) | | | |
| 52 | ispE 4-diphosphocytidyl-2-C-methyl-D-erythritol | 4-diphosphocytidyl-2-C-methyl-D-erythritol kinase [Bacillus | UniRef100_Q62ZW4 | Bacillus licheniformis DSM 13 |
| | kinase | licheniformis DSM 13] | | |
| 53 | purR transcriptional regulator | PurR [Bacillus licheniformis DSM 13] | UniRef100_Q65PH4 | Bacillus licheniformis DSM 13 |
| 54 | yabJ putative regulator of purine operon, putative | YabJ [Bacillus licheniformis DSM 13] | UniRef100_Q65PH3 | Bacillus licheniformis DSM 13 |
| | translation initiation inhibitor | | | |
| 55 | BLP00052 hypothetical protein | | | |
| 56 | spoVG Stage V sporulation protein G | Hypothetical protein spoVG [Bacillus licheniformis DSM 13] | UniRef100_Q65PH2 | Bacillus licheniformis DSM 13 |
| 57 | gcaD UDP-N-acetylglucosamine pyrophosphorylase | GcaD [Bacillus licheniformis DSM 13] | UniRef100_Q65PH1 | Bacillus licheniformis DSM 13 |
| 58 | prs phosphoribosylpyrophosphate synthetase | Prs [Bacillus licheniformis DSM 13] | UniRef100_Q65PH0 | Bacillus licheniformis DSM 13 |
| 59 | ctc general stress protein | Ctc [Bacillus licheniformis DSM 13] | UniRef100_Q65PG9 | Bacillus licheniformis DSM 13 |
| 60 | spoVC peptidyl-tRNA hydrolase | SpoVC [Bacillus licheniformis DSM 13] | UniRef100_Q65PG8 | Bacillus licheniformis DSM 13 |
| 61 | yabK conserved hypothetical YabK | Hypothetical protein yabK [Bacillus licheniformis DSM 13] | UniRef100_Q65PG7 | Bacillus licheniformis DSM 13 |
| 62 | mfd transcription-repair coupling factor | Mfd [Bacillus licheniformis DSM 13] | UniRef100_Q65PG6 | Bacillus licheniformis DSM 13 |
| 63 | spoVT transcriptional regulator | SpoVT [Bacillus licheniformis DSM 13] | UniRef100_Q65PG5 | Bacillus licheniformis DSM 13 |
| 64 | yabM putative Polysaccharide biosynthesis protein | YabM [Bacillus licheniformis DSM 13] | UniRef100_Q65PG4 | Bacillus licheniformis DSM 13 |
| | YabM | | | |
| 65 | yabN putative phosphatase and methylase | YabN [Bacillus licheniformis DSM 13] | UniRef100_Q65PG3 | Bacillus licheniformis DSM 13 |
| 66 | yabO putative RNA-binding S4 protein YabO | YabO [Bacillus licheniformis DSM 13] | UniRef100_Q65PG2 | Bacillus licheniformis DSM 13 |
| 67 | yabP conserved hypothetical protein YabP | Hypothetical protein yabP [Bacillus licheniformis DSM 13] | UniRef100_Q65PG1 | Bacillus licheniformis DSM 13 |
| 68 | yabQ essential protein for formation of the spore | Hypothetical protein yabQ [Bacillus licheniformis DSM 13] | UniRef100_Q65PG0 | Bacillus licheniformis DSM 13 |
| | cortex YabQ | | | |
| 69 | divIC cell-division initiation protein | DivIC [Bacillus licheniformis DSM 13] | UniRef100_Q65PF9 | Bacillus licheniformis DSM 13 |
| 70 | yabR putative Nucleic acid-binding OB-fold | YabR [Bacillus licheniformis DSM 13] | UniRef100_Q65PF8 | Bacillus licheniformis DSM 13 |
| | protein, contains S1 domain | | | |
| 71 | spoIIE seine phosphatase | SpoIIE [Bacillus licheniformis DSM 13] | UniRef100_Q65PF7 | Bacillus licheniformis DSM 13 |
| 72 | yabS YabS | YabS [Bacillus licheniformis DSM 13] | UniRef100_Q65PF6 | Bacillus licheniformis DSM 13 |
| 73 | yabT putative serine_threonine-protein kinase | YabT [Bacillus licheniformis DSM 13] | UniRef100_Q65PF5 | Bacillus licheniformis DSM 13 |
| 74 | tilS tRNA(Ile)-lysidine synthetase | YacA [Bacillus licheniformis DSM 13] | UniRef100_Q65PF4 | Bacillus licheniformis DSM 13 |
| 75 | hprT hypoxanthine-guanine | HprT [Bacillus licheniformis DSM 13] | UniRef100_Q65PF3 | Bacillus licheniformis DSM 13 |
| | phosphoribosyltransferase | | | |
| 76 | ftsH cell-division protein and general stress protein | FtsH [Bacillus licheniformis DSM 13] | UniRef100_Q65PF2 | Bacillus licheniformis DSM 13 |
| | (class III heat-shock) | | | |
| 77 | BLP00074 hypothetical protein | | | |
| 78 | yacB conserved hypothetical protein YacB | Bordetella pertussis Bvg accessory factor [Bacillus | UniRef100_Q62ZU0 | Bacillus licheniformis DSM 13 |
| | | licheniformis DSM 13] | | |
| 79 | hslO putative chaperone protein HslO | YacC [Bacillus licheniformis DSM 13] | UniRef100_Q65PF0 | Bacillus licheniformis DSM 13 |
| 80 | yacD putative PpiC-type peptidyl-prolyl cis-trans | YacD [Bacillus licheniformis DSM 13] | UniRef100_Q65PE9 | Bacillus licheniformis DSM 13 |
| | isomerase | | | |
| 81 | cysK cysteine synthetase A | CysK [Bacillus licheniformis DSM 13] | UniRef100_Q65PE8 | Bacillus licheniformis DSM 13 |
| 82 | BLP04683 hypothetical protein | | | |
| 83 | pabB para-aminobenzoate synthase (subunit A) | PabB [Bacillus licheniformis DSM 13] | UniRef100_Q65PE7 | Bacillus licheniformis DSM 13 |
| 84 | pabA para-aminobenzoate synthase glutamine | PabA (Para-aminobenzoate synthase glutamine | UniRef100_Q65PE6 | Bacillus licheniformis DSM 13 |
| | amidotransferase (subunit B) and anthranilate | amidotransferase (Subunit B) and anthranilate synthase) | | |
| | synthase (subunit II) | [Bacillus licheniformis DSM 13] | | |
| 85 | pabC aminodeoxychorismate lyase | PabC [Bacillus licheniformis DSM 13] | UniRef100_Q65PE5 | Bacillus licheniformis DSM 13 |
| 86 | sul dihydropteroate synthase | Sul [Bacillus licheniformis DSM 13] | UniRef100_Q65PE4 | Bacillus licheniformis DSM 13 |
| 87 | folB dihydroneopterin aldolase | FolB [Bacillus licheniformis DSM 13] | UniRef100_Q65PE3 | Bacillus licheniformis DSM 13 |
| 88 | folK 7,8-dihydro-6-hydroxymethylpterin | FolK [Bacillus licheniformis DSM 13] | UniRef100_Q65PE2 | Bacillus licheniformis DSM 13 |
| | pyrophosphokinase | | | |
| 89 | dus1 putative Dihydrouridine synthase TIM-barrel | YacF [Bacillus licheniformis DSM 13] | UniRef100_Q65PE1 | Bacillus licheniformis DSM 13 |
| | protein | | | |
| 90 | lysS lysyl-tRNA synthetase | LysS [Bacillus licheniformis DSM 13] | UniRef100_Q65PE0 | Bacillus licheniformis DSM 13 |
| 91 | BLP00087 hypothetical protein | | | |
| 92 | ctsR transcriptional regulator | CtsR [Bacillus licheniformis DSM 13] | UniRef100_Q65PD9 | Bacillus licheniformis DSM 13 |
| 93 | mcsA McsA | Hypothetical protein mcsA [Bacillus licheniformis DSM 13] | UniRef100_Q65PD8 | Bacillus licheniformis DSM 13 |
| 94 | mcsB McsB | Hypothetical protein mcsB [Bacillus licheniformis DSM 13] | UniRef100_Q65PD7 | Bacillus licheniformis DSM 13 |
| 95 | clpC class III stress response-related ATPase | ClpC [Bacillus licheniformis DSM 13] | UniRef100_Q65PD6 | Bacillus licheniformis DSM 13 |
| 96 | radA DNA repair protein RadA | RadA [Bacillus licheniformis DSM 13] | UniRef100_Q65PD5 | Bacillus licheniformis DSM 13 |
| 97 | yacK putative DNA binding protein YacK | YacK (H+-transporting two-sector ATPase, delta (OSCP) | UniRef100_Q65PD4 | Bacillus licheniformis DSM 13 |
| | | subunit) [Bacillus licheniformis DSM 13] | | |
| 98 | BLP00094 hypothetical protein | | | |
| 99 | yacL conserved hypothetical protein YacL | YacL [Bacillus licheniformis DSM 13] | UniRef100_Q65PD3 | Bacillus licheniformis DSM 13 |
| 100 | ispD 4-diphosphocytidyl-2C-methyl-D-erythritol | YacM [Bacillus licheniformis DSM 13] | UniRef100_Q65PD2 | Bacillus licheniformis DSM 13 |
| | synthase | | | |
| 101 | ispF 2-C-methyl-D-erythritol 2,4-cyclodiphosphate | YacN [Bacillus licheniformis DSM 13] | UniRef100_Q65PD1 | Bacillus licheniformis DSM 13 |
| | synthase | | | |
| 102 | gltX glutamyl-tRNA synthetase | GltX [Bacillus licheniformis DSM 13] | UniRef100_Q65PD0 | Bacillus licheniformis DSM 13 |
| 103 | BLP04684 hypothetical protein | | | |
| 104 | cysE serine acetyltransferase | CysE [Bacillus licheniformis DSM 13] | UniRef100_Q65PC9 | Bacillus licheniformis DSM 13 |
| 105 | cysS cysteinyl-tRNA synthetase | CysS [Bacillus licheniformis DSM 13] | UniRef100_Q65PC8 | Bacillus licheniformis DSM 13 |
| 106 | yazC putative Ribonuclease III, conserved | YazC [Bacillus licheniformis DSM 13] | UniRef100_Q65PC7 | Bacillus licheniformis DSM 13 |
| | hypothetical YazC protein | | | |
| 107 | yacO putative tRNA_rRNA methyltransferase YacO | YacO [Bacillus licheniformis DSM 13] | UniRef100_Q65PC6 | Bacillus licheniformis DSM 13 |
| 108 | yacP conserved hypothetical protein YacP | Hypothetical protein yacP [Bacillus licheniformis DSM 13] | UniRef100_Q65PC5 | Bacillus licheniformis DSM 13 |
| 109 | sigH RNA polymerase sigma-30 factor (sigma-H) | RNA polymerase sigma-H factor [Bacillus licheniformis] | UniRef100_P02964 | Bacillus licheniformis |
| 110 | rpmGB 50S ribosomal protein L33 2 | RpmGB [Bacillus licheniformis DSM 13] | UniRef100_Q65PC3 | Bacillus licheniformis DSM 13 |
| 111 | secE preprotein translocase subunit | Preprotein translocase secE subunit [Bacillus licheniformis] | UniRef100_P38381 | Bacillus licheniformis |
| 112 | nusG transcription antitermination factor | NusG [Bacillus licheniformis DSM 13] | UniRef100_Q65PC1 | Bacillus licheniformis DSM 13 |
| 113 | rplK ribosomal protein L11 | RplK [Bacillus licheniformis DSM 13] | UniRef100_Q65PC0 | Bacillus licheniformis DSM 13 |
| 114 | rplA ribosomal protein L1 (BL1) | RplA [Bacillus licheniformis DSM 13] | UniRef100_Q65PB9 | Bacillus licheniformis DSM 13 |
| 115 | rplJ ribosomal protein L10 (BL5) | Ribosomal protein L10 [Bacillus licheniformis DSM 13] | UniRef100_Q62ZQ7 | Bacillus licheniformis DSM 13 |
| 116 | rplL ribosomal protein L12 (BL9) | Ribosomal protein L12 [Bacillus licheniformis DSM 13] | UniRef100_Q62ZQ6 | Bacillus licheniformis DSM 13 |
| 117 | ybxB hypothetical protein with SAM binding motif | YbxB (SAM (And some other nucleotide) binding motif) | UniRef100_Q65PB6 | Bacillus licheniformis DSM 13 |
| | | [Bacillus licheniformis DSM 13] | | |
| 118 | rpoB RNA polymerase (beta subunit) | RNA polymerase beta subunit [Bacillus licheniformis] | UniRef100_Q65PB5 | Bacillus licheniformis |
| 119 | rpoC RNA polymerase (beta subunit) | RpoC [Bacillus licheniformis DSM 13] | UniRef100_Q65PB4 | Bacillus licheniformis DSM 13 |
| 120 | ybxF putative ribosomal protein L7AE family | YbxF [Bacillus licheniformis DSM 13] | UniRef100_Q65PB3 | Bacillus licheniformis DSM 13 |
| 121 | rpsL ribosomal protein S12 (BS12) | RpsL [Bacillus licheniformis DSM 13] | UniRef100_Q65PB2 | Bacillus licheniformis DSM 13 |
| 122 | rpsG ribosomal protein S7 (BS7) | RpsG [Bacillus licheniformis DSM 13] | UniRef100_Q65PB1 | Bacillus licheniformis DSM 13 |
| 123 | fusA elongation factor G | FusA [Bacillus licheniformis DSM 13] | UniRef100_Q65PB0 | Bacillus licheniformis DSM 13 |
| 124 | tufA elongation factor Tu | TufA [Bacillus licheniformis DSM 13] | UniRef100_Q65PA9 | Bacillus licheniformis DSM 13 |
| 125 | BLP04685 hypothetical protein | | | |
| 126 | rpsJ ribosomal protein RpsJ | 30S ribosomal protein S10 [Bacillus halodurans] | UniRef100_Q9Z9L5 | Bacillus halodurans |
| 127 | rplC ribosomal protein L3 (BL3) | RplC [Bacillus licheniformis DSM 13] | UniRef100_Q65PA7 | Bacillus licheniformis DSM 13 |
| 128 | rplD ribosomal protein L4 | RplD [Bacillus licheniformis DSM 13] | UniRef100_Q65PA6 | Bacillus licheniformis DSM 13 |
| 129 | rplW ribosomal protein L23 | RplW [Bacillus licheniformis DSM 13] | UniRef100_Q65PA5 | Bacillus licheniformis DSM 13 |
| 130 | rplB ribosomal protein L2 (BL2) | RplB [Bacillus licheniformis DSM 13] | UniRef100_Q65PA4 | Bacillus licheniformis DSM 13 |
| 131 | rpsS ribosomal protein RpsS | RpsS [Bacillus licheniformis DSM 13] | UniRef100_Q65PA3 | Bacillus licheniformis DSM 13 |
| 132 | rplV ribosomal protein RplV | RplV [Bacillus licheniformis DSM 13] | UniRef100_Q65PA2 | Bacillus licheniformis DSM 13 |
| 133 | rpsC ribosomal protein S3 (BS3) | RpsC [Bacillus licheniformis DSM 13] | UniRef100_Q65PA1 | Bacillus licheniformis DSM 13 |
| 134 | rplP ribosomal protein L16 | RplP [Bacillus licheniformis DSM 13] | UniRef100_Q65PA0 | Bacillus licheniformis DSM 13 |
| 135 | rpmC ribosomal protein L29 | | | |
| 136 | rpsQ ribosomal protein S17 (BS16) | RpsQ [Bacillus licheniformis DSM 13] | UniRef100_Q65P98 | Bacillus licheniformis DSM 13 |
| 137 | rplN ribosomal protein RplN | RplN [Bacillus licheniformis DSM 13] | UniRef100_Q65P97 | Bacillus licheniformis DSM 13 |
| 138 | rplX ribosomal protein L24 (BL23) (histone-like protein | RplX [Bacillus licheniformis DSM 13] | UniRef100_Q65P96 | Bacillus licheniformis DSM 13 |
| | HPB12) | | | |
| 139 | rplE ribosomal protein L5 (BL6) | RplE [Bacillus licheniformis DSM 13] | UniRef100_Q65P95 | Bacillus licheniformis DSM 13 |
| 140 | rpsN 30S ribosomal protein S14 | RpsN [Bacillus licheniformis DSM 13] | UniRef100_Q65P94 | Bacillus licheniformis DSM 13 |
| 141 | rpsH ribosomal protein S8 (BS8) | RpsH [Bacillus licheniformis DSM 13] | UniRef100_Q65P93 | Bacillus licheniformis DSM 13 |
| 142 | rplF ribosomal protein L6 (BL8) | Ribosomal protein L6 [Bacillus licheniformis DSM 13] | UniRef100_Q62ZN1 | Bacillus licheniformis DSM 13 |
| 143 | rplR ribosomal protein L18 | Ribosomal protein L18 [Bacillus licheniformis DSM 13] | UniRef100_Q62ZN0 | Bacillus licheniformis DSM 13 |
| 144 | rpsE ribosomal protein S5 | RpsE [Bacillus licheniformis DSM 13] | UniRef100_Q65P90 | Bacillus licheniformis DSM 13 |
| 145 | rpmD ribosomal protein L30 (BL27) | RpmD [Bacillus licheniformis DSM 13] | UniRef100_Q65P89 | Bacillus licheniformis DSM 13 |
| 146 | rplO ribosomal protein L15 | RplO [Bacillus licheniformis DSM 13] | UniRef100_Q65P88 | Bacillus licheniformis DSM 13 |
| 147 | secY preprotein translocase subunit | SecY [Bacillus licheniformis DSM 13] | UniRef100_Q65P87 | Bacillus licheniformis DSM 13 |
| 148 | adk adenylate kinase | Adk [Bacillus licheniformis DSM 13] | UniRef100_Q65P86 | Bacillus licheniformis DSM 13 |
| 149 | map methionine aminopeptidase | Map [Bacillus licheniformis DSM 13] | UniRef100_Q65P85 | Bacillus licheniformis DSM 13 |
| 150 | BLP00139 hypothetical protein | Hypothetical protein [Bacillus licheniformis DSM 13] | UniRef100_Q65P84 | Bacillus licheniformis DSM 13 |
| 151 | infA Translation initiation factor IF-1 InfA | InfA [Bacillus licheniformis DSM 13] | UniRef100_Q65P83 | Bacillus licheniformis DSM 13 |
| 152 | rpmJ ribosomal protein L36 (ribosomal protein B) | 50S ribosomal protein L36 [Bacillus subtilis] | UniRef100_P20278 | Bacillus subtilis |
| 153 | rpsM Ribosomal protein S13 RpsM | RpsM [Bacillus licheniformis DSM 13] | UniRef100_Q65P81 | Bacillus licheniformis DSM 13 |
| 154 | rpsK ribosomal protein S11 (BS11) | RpsK [Bacillus licheniformis DSM 13] | UniRef100_Q65P80 | Bacillus licheniformis DSM 13 |
| 155 | rpoA RNA polymerase (alpha subunit) | RpoA [Bacillus licheniformis DSM 13] | UniRef100_Q65P79 | Bacillus licheniformis DSM 13 |
| 156 | rplQ ribosomal protein L17 (BL15) | RplQ [Bacillus licheniformis DSM 13] | UniRef100_Q65P78 | Bacillus licheniformis DSM 13 |
| 157 | cbiO ABC transporter | YbxA [Bacillus licheniformis DSM 13] | UniRef100_Q65P77 | Bacillus licheniformis DSM 13 |
| 158 | ybaE ABC transport system ATP-binding protein | YbaE [Bacillus licheniformis DSM 13] | UniRef100_Q65P76 | Bacillus licheniformis DSM 13 |
| 159 | ybaF Cobalt transport protein | YbaF [Bacillus licheniformis DSM 13] | UniRef100_Q65P75 | Bacillus licheniformis DSM 13 |
| 160 | truA pseudouridylate synthase I | TruA [Bacillus licheniformis DSM 13] | UniRef100_Q65P74 | Bacillus licheniformis DSM 13 |
| 161 | rplM ribosomal protein L13 | RplM [Bacillus licheniformis DSM 13] | UniRef100_Q65P73 | Bacillus licheniformis DSM 13 |
| 162 | rpsI ribosomal protein S9 | RpsI [Bacillus licheniformis DSM 13] | UniRef100_Q65P72 | Bacillus licheniformis DSM 13 |
| 163 | BLP00148 Lambda integrase-like protein(phage | Hypothetical protein [Bacillus licheniformis DSM 13] | UniRef100_Q65KT3 | Bacillus licheniformis DSM 13 |
| | related) | | | |
| 164 | BLP04812 phage related protein | Hypothetical protein [Bacillus licheniformis DSM 13] | UniRef100_Q62W79 | Bacillus licheniformis DSM 13 |
| 165 | yonS conserved hypothetical phage protein YonS | Hypothetical protein [Bacillus licheniformis DSM 13] | UniRef100_Q65KT1 | Bacillus licheniformis DSM 13 |
| 166 | BLP00149 conserved hypothetical phage protein | Hypothetical protein [Bacillus licheniformis DSM 13] | UniRef100_Q65KT0 | Bacillus licheniformis DSM 13 |
| 167 | BLP00150 hypothetical protein | Hypothetical protein [Bacillus licheniformis DSM 13] | UniRef100_Q65KS9 | Bacillus licheniformis DSM 13 |
| 168 | yqaE probable transcriptional regulator (phage- | YqaE [Bacillus licheniformis DSM 13] | UniRef100_Q65KS8 | Bacillus licheniformis DSM 13 |
| | related) | | | |
| 169 | BLP00152 Putative transcriptional regulator | Transcriptional regulator, Cro/Cl family [Enterococcus | UniRef100_Q832S7 | Enterococcus faecalis |
| | | faecalis] | | |
| 170 | BLP00153 hypothetical protein | Hypothetical protein [Bacillus licheniformis DSM 13] | UniRef100_Q65KS7 | Bacillus licheniformis DSM 13 |
| 171 | BLP00154 conserved hypothetical protein | Hypothetical protein [Bacillus licheniformis DSM 13] | UniRef100_Q65KS6 | Bacillus licheniformis DSM 13 |
| 172 | BLP00155 putative phage protein | 77ORF010 [Bacteriophage 77] | UniRef100_Q6R854 | Bacteriophage 77 |
| 173 | BLP00156 hypothetical protein | Hypothetical protein [Bacillus licheniformis DSM 13] | UniRef100_Q65KS4 | Bacillus licheniformis DSM 13 |
| 174 | BLP04687 hypothetical protein | | | |
| 175 | BLP04842 conserved hypothetical protein | Hypothetical protein [Bacillus licheniformis DSM 13] | UniRef100_Q62W68 | Bacillus licheniformis DSM 13 |
| 176 | BLP00157 phage related protein | Orf178 [Staphylococcus aureus temperate phage phiSLT] | UniRef100_Q9B0G4 | Staphylococcus aureus temperate |
| | | | | phage phiSLT |
| 177 | BLP00158 conserved hypothetical phage protein | Hypothetical protein [Enterococcus faecalis] | UniRef100_Q833D2 | Enterococcus faecalis |
| 178 | BLP00159 conserved hypothetical phage protein | | | |
| 179 | BLP00160 hypothetical protein | | | |
| 180 | BLP04686 hypothetical protein | | | |
| 181 | BLP00161 hypothetical protein | | | |
| 182 | BLP00162 conserved hypothetical phage protein | Hypothetical protein [Bacillus anthracis] | UniRef100_Q81XU9 | Bacillus anthracis |
| 183 | BLP00163 hypothetical protein | DNA replication protein DnaC [Clostridium acetobutylicum] | UniRef100_Q97HS5 | Clostridium acetobutylicum |
| 184 | yqaO phage related protein YqaO | YqaO [Bacillus licheniformis DSM 13] | UniRef100_Q65KR7 | Bacillus licheniformis DSM 13 |
| 185 | BLP00166 conserved hypothetical protein | Hypothetical protein [Bacillus licheniformis DSM 13] | UniRef100_Q65KR6 | Bacillus licheniformis DSM 13 |
| 186 | BLP00167 conserved hypothetical protein | Hypothetical protein [Bacillus licheniformis DSM 13] | UniRef100_Q65KR5 | Bacillus licheniformis DSM 13 |
| 187 | BLP00168 hypothetical protein | | | |
| 188 | BLP00169 hypothetical protein | Hypothetical protein [Bacillus licheniformis DSM 13] | UniRef100_Q65KR2 | Bacillus licheniformis DSM 13 |
| 189 | BLP00170 phage related protein | Prophage Lp1 protein 30 [Lactobacillus plantarum] | UniRef100_Q88YU0 | Lactobacillus plantarum |
| 190 | yqaN phage related protein YqaN | YqaN [Bacillus licheniformis DSM 13] | UniRef100_Q65KQ9 | Bacillus licheniformis DSM 13 |
| 191 | BLP00172 hypothetical protein | Hypothetical protein [Bacillus licheniformis DSM 13] | UniRef100_Q62W56 | Bacillus licheniformis DSM 13 |
| 192 | BLP00173 hypothetical protein | | | |
| 193 | BLP00174 conserved Ssb-homolog protein | Ssb [Bacillus licheniformis DSM 13] | UniRef100_Q65CP4 | Bacillus licheniformis DSM 13 |
| 194 | BLP00175 hypothetical protein | | | |
| 195 | BLP00175 hypothetical protein | | | |
| 196 | BLP00177 hypothetical protein | | | |
| 197 | ssb single-strand DNA-binding protein | Single-strand DNA-binding protein [Bacillus licheniformis | UniRef100_Q62W55 | Bacillus licheniformis DSM 13 |
| | | DSM 13] | | |
| 198 | BLP04690 hypothetical protein | | | |
| 199 | BLP00179 conserved hypothetical protein | Hypothetical protein [Bacillus licheniformis DSM 13] | UniRef100_Q65KQ7 | Bacillus licheniformis DSM 13 |
| 200 | BLP00180 hypothetical protein | Hypothetical protein [Bacillus licheniformis DSM 13] | UniRef100_Q65KQ6 | Bacillus licheniformis DSM 13 |
| 201 | BLP00181 conserved hypothetical protein | YqaQ [Bacillus licheniformis DSM 13] | UniRef100_Q65KQ3 | Bacillus licheniformis DSM 13 |
| 202 | BLP00182 phage related protein | Hypothetical protein [Bacillus licheniformis DSM 13] | UniRef100_Q65KQ1 | Bacillus licheniformis DSM 13 |
| 203 | BLP00183 hypothetical protein | | | |
| 204 | BLP00184 putative terminase small subunit protein | Putative terminase small subunit TerS [Bacteriophage | UniRef100_Q7Y5U8 | Bacteriophage Aaphi23 |
| | | Aaphi23] | | |
| 205 | BLP00185 putative phage terminase, large subunit, | UPI00003CC57A UniRef100 entry | UniRef100_UPI00003CC57A | |
| | PBSX family | | | |
| 206 | BLP00186 hypothetical protein | | | |
| 207 | BLP00187 putative Phage portal protein, A118 family | UPI00003CC5A4 UniRef100 entry | UniRef100_UPI00003CC5A4 | |
| 208 | BLP00189 putative Gp4-like protein | UPI00003CC514 UniRef100 entry | UniRef100_UPI00003CC514 | |
| 209 | BLP00190 hypothetical protein | | | |
| 210 | BLP00191 hypothetical protein | | | |
| 211 | BLP00192 conserved hypothetical phage protein | Pas24 [Actinoplanes phage phiAsp2] | UniRef100_Q6J807 | Actinoplanes phage phiAsp2 |
| 212 | BLP00193 conserved hypothetical phage-like protein | Hypothetical protein SPs0635 [Streptococcus pyogenes] | UniRef100_Q879B4 | Streptococcus pyogenes |
| 213 | BLP00194 conserved phage protein | Lin2390 protein [Listeria innocua] | UniRef100_Q928Z0 | Listeria innocua |
| 214 | BLP00195 conserved phage protein | | | |
| 215 | BLP00196 conserved phage protein | UPI00003CC51A UniRef100 entry | UniRef100_UPI00003CC51A | |
| 216 | BLP04843 conserved hypothetical phage protein | UPI00003CA3DF UniRef100 entry | UniRef100_UPI00003CA3DF | |
| 217 | BLP00197 hypothetical protein | | | |
| 218 | BLP00198 hypothetical protein | UPI00003CC51D UniRef100 entry | UniRef100_UPI00003CC51D | |
| 219 | BLP04691 hypothetical protein | | | |
| 220 | BLP00199 hypothetical protein | UPI00003CC51E UniRef100 entry | UniRef100_UPI00003CC51E | |
| 221 | BLP00200 hypothetical protein | UPI00003CC549 UniRef100 entry | UniRef100_UPI00003CC549 | |
| 222 | BLP00201 hypothetical protein | Hypothetical protein [Bacillus licheniformis DSM 13] | UniRef100_Q65KN3 | Bacillus licheniformis DSM 13 |
| 223 | BLP00203 hypothetical protein | UPI00003CC2A0 UniRef100 entry | UniRef100_UPI00003CC2A0 | |
| 224 | BLP00204 phage related protein | Hypothetical Phage minor structural protein, N-terminal | UniRef100_Q65KN1 | Bacillus licheniformis DSM 13 |
| | | [Bacillus licheniformis DSM 13] | | |
| 225 | BLP00205 hypothetical protein | Complete nucleotide sequence [Bacteriophage SPP1] | UniRef100_O48465 | Bacteriophage SPP1 |
| 226 | BLP00206 hypothetical protein | | | |
| 227 | BLP00207 hypothetical protein | | | |
| 228 | BLP00208 hypothetical protein | | | |
| 229 | BLP00209 hypothetical protein | | | |
| 230 | BLP00210 hypothetical protein | | | |
| 231 | BLP00211 N-acetylmuramoyl-L-alanine amidase | Complete nucleotide sequence [Bacteriophage SPP1] | UniRef100_O48471 | Bacteriophage SPP1 |
| 232 | BLP00212 hypothetical protein | YizA [Bacillus licheniformis DSM 13] | UniRef100_Q65P71 | Bacillus licheniformis DSM 13 |
| 233 | ybaK conserved hypothetical protein YbaK | Hypothetical protein ybaK [Bacillus licheniformis DSM 13] | UniRef100_Q65P70 | Bacillus licheniformis DSM 13 |
| 234 | cwlD N-acetylmuramoyl-L-alanine amidase | CwlD [Bacillus licheniformis DSM 13] | UniRef100_Q65P69 | Bacillus licheniformis DSM 13 |
| 235 | mrp putative ATP-binding protein Mrp | YbaL [Bacillus licheniformis DSM 13] | UniRef100_Q65P68 | Bacillus licheniformis DSM 13 |
| 236 | gerD GerD | Hypothetical protein gerD [Bacillus licheniformis DSM 13] | UniRef100_Q65P67 | Bacillus licheniformis DSM 13 |
| 237 | BLP04692 hypothetical protein | | | |
| 238 | kbaA kinB signaling pathway activation protein KbaA | Hypothetical protein kbaA [Bacillus licheniformis DSM 13] | UniRef100_Q65P66 | Bacillus licheniformis DSM 13 |
| 239 | ybaN Polysaccharide deacetylase, Carbohydrate | YbaN [Bacillus licheniformis DSM 13] | UniRef100_Q65P65 | Bacillus licheniformis DSM 13 |
| | Esterase Family 4 | | | |
| 240 | BLP00219 putative integrase | UPI00003CB8B4 UniRef100 entry | UniRef100_UPI00003CB8B4 | |
| 241 | BLP00220 hypothetical protein | | | |
| 242 | BLP00221 hypothetical protein | Hypothetical protein [Bacillus licheniformis DSM 13] | UniRef100_Q65KE2 | Bacillus licheniformis DSM 13 |
| 243 | BLP00222 hypothetical protein | | | |
| 244 | BLP04911 conserved hyopothetical protein | | | |
| 245 | BLP04912 hypothetical protein | | | |
| 246 | BLP04693 hypothetical protein | | | |
| 247 | BLP04913 hypothetical protein | | | |
| 248 | BLP00223 hypothetical protein | | | |
| 249 | BLP04914 hypothetical protein | | | |
| 250 | BLP00224 hypothetical protein | | | |
| 251 | BLP04915 hypothetical protein | | | |
| 252 | BLP00225 hypothetical protein | Hypothetical protein [Bacillus cereus ZK] | UniRef100_Q633V9 | Bacillus cereus ZK |
| 253 | BLP04916 hypothetical protein | | | |
| 254 | BLP00226 hypothetical protein | | | |
| 255 | BLP00227 hypothetical protein | | | |
| 256 | BLP04917 hypothetical protein | | | |
| 257 | BLP04918 hypothetical protein | | | |
| 258 | BLP00228 hypothetical protein | Transposase, IS256 family [Enterococcus faecalis] | UniRef100_Q833S8 | Enterococcus faecalis |
| 259 | BLP04694 hypothetical protein | Very-short-patch-repair endonuclease [Oceanobacillus | UniRef100_Q8EL90 | Oceanobacillus iheyensis |
| | | iheyensis] | | |
| 260 | BLP00229 hypothetical protein | Hypothetical protein OB3334 [Oceanobacillus iheyensis] | UniRef100_Q8EL97 | Oceanobacillus iheyensis |
| 261 | BLP04813 conserved hypothetical | Hypothetical protein [Bacillus cereus ZK] | UniRef100_Q636X5 | Bacillus cereus ZK |
| 262 | BLP00230 Modification methylase, Cytosine-specific | Cytosine-specific DNA-methyltransferase [Oceanobacillus | UniRef100_Q8EL98 | Oceanobacillus iheyensis |
| | methyltransferase | iheyensis] | | |
| 263 | BLP00231 hypothetical protein | | | |
| 264 | BLP00232 hypothetical protein | | | |
| 265 | BLP00233 hypothetical protein | | | |
| 266 | BLP04695 hypothetical protein | DNA-binding protein [Listeria monocytogenes] | UniRef100_Q723Z9 | Listeria monocytogenes |
| 267 | BLP00234 hypothetical protein | | | |
| 268 | pbpX penicillin-binding protein | PbpX [Bacillus licheniformis DSM 13] | UniRef100_Q65P64 | Bacillus licheniformis DSM 13 |
| 269 | BLP00236 hypothetical protein | Hypothetical protein [Bacillus licheniformis DSM 13] | UniRef100_Q65P63 | Bacillus licheniformis DSM 13 |
| 270 | ybaS Bile acid:sodium symporter | YbaS [Bacillus licheniformis DSM 13] | UniRef100_Q65P62 | Bacillus licheniformis DSM 13 |
| 271 | yxaJ conserved hypothetical protein YxaJ | YxaJ [Bacillus licheniformis DSM 13] | UniRef100_Q65P61 | Bacillus licheniformis DSM 13 |
| 272 | BLP00239 Phenazine biosynthesis PhzC_PhzF | Hypothetical protein [Bacillus licheniformis DSM 13] | UniRef100_Q65P60 | Bacillus licheniformis DSM 13 |
| | protein, Aminoacyl-tRNA synthetase, class I | | | |
| 273 | ybbC conserved hypothetical protein YbbC | YbbC [Bacillus licheniformis DSM 13] | UniRef100_Q65P59 | Bacillus licheniformis DSM 13 |
| 274 | ybbD Glycoside hydrolase, family 3 | YbbD [Bacillus licheniformis DSM 13] | UniRef100_Q65P58 | Bacillus licheniformis DSM 13 |
| 275 | ybbE putative beta-lactamase YbbE | YbbE [Bacillus licheniformis DSM 13] | UniRef100_Q65P57 | Bacillus licheniformis DSM 13 |
| 276 | BLP00243 hypothetical protein | | | |
| 277 | ybbF Phosphotransferase system PTS, EIIB | YbbF [Bacillus licheniformis DSM 13] | UniRef100_Q65P56 | Bacillus licheniformis DSM 13 |
| | domain, Phosphotransferase system, EIIC | | | |
| 278 | ybbH probable transcriptional regulator YbbH | YbbH [Bacillus licheniformis DSM 13] | UniRef100_Q65P55 | Bacillus licheniformis DSM 13 |
| 279 | ybbI putative sugar phosphate isomerase YbbI | YbbI [Bacillus licheniformis DSM 13] | UniRef100_Q65P54 | Bacillus licheniformis DSM 13 |
| 280 | ybbK conserved hypothetical protein YbbK | YbbK [Bacillus licheniformis DSM 13] | UniRef100_Q65P53 | Bacillus licheniformis DSM 13 |
| 281 | rocF arginase | Hypothetical protein [Bacillus licheniformis DSM 13] | UniRef100_Q65P52 | Bacillus licheniformis DSM 13 |
| 282 | sigW RNA polymerase ECF(extracytoplasmic | SigW (RNA polymerase ECF(Extracytoplasmic function)-type | UniRef100_Q65P51 | Bacillus licheniformis DSM 13 |
| | function)-type sigma factor (sigma-W) | sigma factor) [Bacillus licheniformis DSM 13] | | |
| 283 | rsiW antisigma factor RsiW | Hypothetical protein ybbM [Bacillus licheniformis DSM 13] | UniRef100_Q65P50 | Bacillus licheniformis DSM 13 |
| 284 | ybbP conserved hypothetical containing domain | Hypothetical protein ybbP [Bacillus licheniformis DSM 13] | UniRef100_Q62ZI8 | Bacillus licheniformis DSM 13 |
| | DUF147 YbbP | | | |
| 285 | ybbR conserved hypothetical protein YbbR | Hypothetical protein ybbR [Bacillus licheniformis DSM 13] | UniRef100_Q65P48 | Bacillus licheniformis DSM 13 |
| 286 | glmM putative Phosphoglucosamine mutase GlmM | YbbT [Bacillus licheniformis DSM 13] | UniRef100_Q65P47 | Bacillus licheniformis DSM 13 |
| 287 | BLP00254 hypothetical protein | | | |
| 288 | glmS L-glutamine-D-fructose-6-phosphate | GlmS [Bacillus licheniformis DSM 13] | UniRef100_Q65P46 | Bacillus licheniformis DSM 13 |
| | amidotransferase | | | |
| 289 | BLP00256 hypothetical protein | Hypothetical protein [Bacillus licheniformis DSM 13] | UniRef100_Q65P45 | Bacillus licheniformis DSM 13 |
| 290 | BLP00257 hypothetical protein | Hypothetical protein [Bacillus licheniformis DSM 13] | UniRef100_Q65P44 | Bacillus licheniformis DSM 13 |
| 291 | BLP00258 ABC transporter, ATP_GTP-binding site | Hypothetical protein [Bacillus licheniformis DSM 13] | UniRef100_Q65P43 | Bacillus licheniformis DSM 13 |
| | motif A (P-loop) | | | |
| 292 | BLP00259 conserved hypothetical protein | Hypothetical protein [Bacillus licheniformis DSM 13] | UniRef100_Q65P42 | Bacillus licheniformis DSM 13 |
| 293 | BLP00260 hypothetical protein | Hypothetical protein [Bacillus licheniformis DSM 13] | UniRef100_Q65P41 | Bacillus licheniformis DSM 13 |
| 294 | ybcL probable transporter | YbcL [Bacillus licheniformis DSM 13] | UniRef100_Q65P40 | Bacillus licheniformis DSM 13 |
| 295 | BLP00262 conserved hypothetical protein | Hypothetical protein [Bacillus licheniformis DSM 13] | UniRef100_Q65P39 | Bacillus licheniformis DSM 13 |
| 296 | yvcC ABC transporter | YvcC [Bacillus licheniformis DSM 13] | UniRef100_Q65P38 | Bacillus licheniformis DSM 13 |
| 297 | ywbO DSBA oxidoreductase YwbO | YwbO [Bacillus licheniformis DSM 13] | UniRef100_Q65P37 | Bacillus licheniformis DSM 13 |
| 298 | BLP04696 hypothetical protein | | | |
| 299 | BLP00265 hypothetical protein | Hypothetical protein [Bacillus licheniformis DSM 13] | UniRef100_Q65P36 | Bacillus licheniformis DSM 13 |
| 300 | BLP00266 conserved hypothetical protein | Hypothetical protein [Bacillus licheniformis DSM 13] | UniRef100_Q65P35 | Bacillus licheniformis DSM 13 |
| 301 | aadK aminoglycoside 6-adenylyltransferase | AadK [Bacillus licheniformis DSM 13] | UniRef100_Q65P34 | Bacillus licheniformis DSM 13 |
| 302 | BLP00268 conserved hypothetical kinase-like protein | Hypothetical protein [Bacillus licheniformis DSM 13] | UniRef100_Q65P33 | Bacillus licheniformis DSM 13 |
| 303 | yfnB HAD-superfamily hydrolase, subfamily IA, variant | YfnB [Bacillus licheniformis DSM 13] | UniRef100_Q65P32 | Bacillus licheniformis DSM 13 |
| | 1 YfnB | | | |
| 304 | ybxG Amino acid permease YbxG | YbxG [Bacillus licheniformis DSM 13] | UniRef100_Q65P31 | Bacillus licheniformis DSM 13 |
| 305 | BLP00271 hypothetical protein | | | |
| 306 | BLP00272 hypothetical protein | | | |
| 307 | citM secondary transporter of divalent metal | CitM [Bacillus licheniformis DSM 13] | UniRef100_Q65P30 | Bacillus licheniformis DSM 13 |
| | ions_citrate complexes | | | |
| 308 | BLP00274 hypothetical protein | | | |
| 309 | yflP YflP | YflP [Bacillus licheniformis DSM 13] | UniRef100_Q65P29 | Bacillus licheniformis DSM 13 |
| 310 | citT two-component response regulator | CitT [Bacillus licheniformis DSM 13] | UniRef100_Q65P28 | Bacillus licheniformis DSM 13 |
| 311 | citS two-component sensor histidine kinase | CitS [Bacillus licheniformis DSM 13] | UniRef100_Q65P27 | Bacillus licheniformis DSM 13 |
| 312 | cisL transcriptional activator of the cysJI operon | Hypothetical protein [Bacillus licheniformis DSM 13] | UniRef100_Q65P26 | Bacillus licheniformis DSM 13 |
| 313 | BLP00279 hypothetical protein | Hypothetical protein [Bacillus licheniformis DSM 13] | UniRef100_Q65P25 | Bacillus licheniformis DSM 13 |
| 314 | BLP00280 Sugar transporter superfamily | Hypothetical protein [Bacillus licheniformis DSM 13] | UniRef100_Q65P24 | Bacillus licheniformis DSM 13 |
| 315 | csgA sporulation-specific SASP protein | CsgA [Bacillus licheniformis DSM 13] | UniRef100_Q65P23 | Bacillus licheniformis DSM 13 |
| 316 | ybxH conserved hypothetical protein YbxH | Hypothetical protein ybxH [Bacillus licheniformis DSM 13] | UniRef100_Q65P22 | Bacillus licheniformis DSM 13 |
| 317 | BLP00283 hypothetical protein | | | |
| 318 | ybyB conserved hypothetical protein YbyB | Hypothetical protein ybyB [Bacillus licheniformis DSM 13] | UniRef100_Q62ZG0 | Bacillus licheniformis DSM 13 |
| 319 | yyaL conserved protein YyaL | YyaL [Bacillus licheniformis DSM 13] | UniRef100_Q65P20 | Bacillus licheniformis DSM 13 |
| 320 | ydeG Major facilitator superfamily | YdeG [Bacillus licheniformis DSM 13] | UniRef100_Q65P12 | Bacillus licheniformis DSM 13 |
| 321 | BLP00287 SAM (and some other nucleotide) binding | Hypothetical protein [Bacillus licheniformis DSM 13] | UniRef100_Q65P11 | Bacillus licheniformis DSM 13 |
| | motif, Generic methyltransferase | | | |
| 322 | BLP00288 conserved hypothetical, putative | Hypothetical protein [Bacillus licheniformis DSM 13] | UniRef100_Q65P10 | Bacillus licheniformis DSM 13 |
| | epimerase | | | |
| 323 | BLP04697 hypothetical protein | | | |
| 324 | BLP00289 hypothetical protein | Hypothetical protein [Bacillus licheniformis DSM 13] | UniRef100_Q65P09 | Bacillus licheniformis DSM 13 |
| 325 | BLP00290 Na_Pi cotransporter II-related protein | Hypothetical protein [Bacillus licheniformis DSM 13] | UniRef100_Q65P08 | Bacillus licheniformis DSM 13 |
| 326 | yubF conserved protein YubF | YubF [Bacillus licheniformis DSM 13] | UniRef100_Q65P07 | Bacillus licheniformis DSM 13 |
| 327 | BLP00292 hypothetical protein | Hypothetical protein [Bacillus licheniformis DSM 13] | UniRef100_Q65P06 | Bacillus licheniformis DSM 13 |
| 328 | BLP00293 hypothetical protein | YbfF [Bacillus licheniformis DSM 13] | UniRef100_Q65P05 | Bacillus licheniformis DSM 13 |
| 329 | BLP00294 hypothetical protein | Hypothetical protein [Bacillus licheniformis DSM 13] | UniRef100_Q65P04 | Bacillus licheniformis DSM 13 |
| 330 | BLP00295 hypothetical protein | Hypothetical protein [Bacillus licheniformis DSM 13] | UniRef100_Q65P03 | Bacillus licheniformis DSM 13 |
| 331 | ybfH conserved hypothetical membrane protein YbfH | Hypothetical protein ybfH [Bacillus licheniformis DSM 13] | UniRef100_Q65P02 | Bacillus licheniformis DSM 13 |
| 332 | ybfI conserved hypothetical protein YbfI | YbfI protein [Bacillus subtilis] | UniRef100_O31449 | Bacillus subtilis |
| 333 | BLP00298 hypothetical protein | Hypothetical protein [Bacillus licheniformis DSM 13] | UniRef100_Q65NZ9 | Bacillus licheniformis DSM 13 |
| 334 | BLP00299 conserved hypothetical DNA-binding | Hypothetical protein [Bacillus licheniformis DSM 13] | UniRef100_Q65NZ8 | Bacillus licheniformis DSM 13 |
| | protein | | | |
| 335 | BLP00300 Hypothetical Bipartite response regulator, | Hypothetical protein [Bacillus licheniformis DSM 13] | UniRef100_Q65NZ7 | Bacillus licheniformis DSM 13 |
| | C-terminal effector | | | |
| 336 | BLP00301 putative Iron-containing alcohol | Hypothetical protein [Bacillus licheniformis DSM 13] | UniRef100_Q65NZ6 | Bacillus licheniformis DSM 13 |
| | dehydrogenase | | | |
| 337 | yvaQ putative transmembrane receptor taxis protein | YvaQ [Bacillus licheniformis DSM 13] | UniRef100_Q65NZ5 | Bacillus licheniformis DSM 13 |
| | YvaQ | | | |
| 338 | BLP00303 putative ribose ABC transporter (ribose- | Hypothetical protein [Bacillus licheniformis DSM 13] | UniRef100_Q65NZ4 | Bacillus licheniformis DSM 13 |
| | binding protein) | | | |
| 339 | BLP00304 putative lytic transglycosylase YomI | Hypothetical protein yomI [Bacillus licheniformis DSM 13] | UniRef100_Q65NZ3 | Bacillus licheniformis DSM 13 |
| 340 | BLP00305 hypothetical protein | Hypothetical protein [Bacillus licheniformis DSM 13] | UniRef100_Q65NZ2 | Bacillus licheniformis DSM 13 |
| 341 | BLP00306 putative soluble quinoprotein glucose | Hypothetical protein [Bacillus licheniformis DSM 13] | UniRef100_Q65NZ1 | Bacillus licheniformis DSM 13 |
| | dehydrogenase protein | | | |
| 342 | ycbP conserved hypothetical protein YcbP | YcbP [Bacillus licheniformis DSM 13] | UniRef100_Q65NZ0 | Bacillus licheniformis DSM 13 |
| 343 | ybgF Amino acid permease YbgF | YbgF [Bacillus licheniformis DSM 13] | UniRef100_Q65NY9 | Bacillus licheniformis DSM 13 |
| 344 | ybgG Homocysteine S-methyltransferase YbgG | YbgG [Bacillus licheniformis DSM 13] | UniRef100_Q65NY8 | Bacillus licheniformis DSM 13 |
| 345 | BLP00310 Hypothetical YdjC-like protein | Hypothetical protein [Bacillus licheniformis DSM 13] | UniRef100_Q65NY7 | Bacillus licheniformis DSM 13 |
| 346 | BLP00311 phosphotransferase system (PTS) N- | Hypothetical protein (Phosphotransferase system (PTS) N- | UniRef100_Q65NY6 | Bacillus licheniformis DSM 13 |
| | acetylglucosamine-specific enzyme IICB component | acetylglucosamine-specific enzyme IICB component) [Bacillus | | |
| | | licheniformis DSM 13] | | |
| 347 | mtaA transcriptional regulator | Hypothetical protein [Bacillus licheniformis DSM 13] | UniRef100_Q65NY5 | Bacillus licheniformis DSM 13 |
| 348 | BLP00313 conserved hypothetical protein | Hypothetical protein [Bacillus licheniformis DSM 13] | UniRef100_Q65NY4 | Bacillus licheniformis DSM 13 |
| 349 | BLP00314 putative carbonic anhyrdase | Hypothetical protein [Bacillus licheniformis DSM 13] | UniRef100_Q65NY3 | Bacillus licheniformis DSM 13 |
| 350 | BLP00315 hypothetical protein | | | |
| 351 | yjgA conserved hypothetical protein YjgA | YjgA [Bacillus licheniformis DSM 13] | UniRef100_Q65NY2 | Bacillus licheniformis DSM 13 |
| 352 | BLP00317 Sodium:alanine symporter | Sodium:alanine symporter, Sodium:alanine symporter | UniRef100_Q62ZC8 | Bacillus licheniformis DSM 13 |
| | | [Bacillus licheniformis DSM 13] | | |
| 353 | ybgJ Glutaminase YbgJ | YbgJ [Bacillus licheniformis DSM 13] | UniRef100_Q65NY1 | Bacillus licheniformis DSM 13 |
| 354 | BLP00319 hypothetical protein | | | |
| 355 | ycbA Two component Histidine kinase YcbA | YcbA [Bacillus licheniformis DSM 13] | UniRef100_Q65NY0 | Bacillus licheniformis DSM 13 |
| 356 | glnL, ycbB Sensory transduction protein GlnL | YcbB [Bacillus licheniformis DSM 13] | UniRef100_Q65NX9 | Bacillus licheniformis DSM 13 |
| 357 | ynaD GCN5-related N-acetyltransferase | YnaD [Bacillus licheniformis DSM 13] | UniRef100_Q65NX8 | Bacillus licheniformis DSM 13 |
| 358 | blaRI Penicillin-binding protein, transpeptidase | Regulatory protein blaR1 [Bacillus licheniformis DSM 13] | UniRef100_Q65NX7 | Bacillus licheniformis DSM 13 |
| | domain, Peptidase M56, BlaR1 | | | |
| 359 | blaI putative beta-lactamase repressor protein | Penicillinase repressor [Bacillus licheniformis DSM 13] | UniRef100_Q65NX6 | Bacillus licheniformis DSM 13 |
| 360 | BLP00325 hypothetical protein | | | |
| 361 | BLP00326 hypothetical protein | | | |
| 362 | penP beta-lactamase precursor | PenP [Bacillus licheniformis DSM 13] | UniRef100_Q65NX5 | Bacillus licheniformis DSM 13 |
| 363 | BLP00328 hypothetical protein | | | |
| 364 | phoD phosphodiesterase_alkaline phosphatase D | Phosphodiesterase/alkaline phosphatase D [Bacillus | UniRef100_Q62ZC0 | Bacillus licheniformis DSM 13 |
| | | licheniformis DSM 13] | | |
| 365 | tatAD component of the twin-arginine pre-protein | TatAD [Bacillus licheniformis DSM 13] | UniRef100_Q65NX3 | Bacillus licheniformis DSM 13 |
| | translocation pathway | | | |
| 366 | tatCD component of the twin-arginine pre-protein | TatCD [Bacillus licheniformis DSM 13] | UniRef100_Q65NX2 | Bacillus licheniformis DSM 13 |
| | translocation pathway | | | |
| 367 | BLP00332 hypothetical protein | | | |
| 368 | kdgD Probable 5-dehydro-4-deoxyglucarate | YcbC [Bacillus licheniformis DSM 13] | UniRef100_Q65NX1 | Bacillus licheniformis DSM 13 |
| | dehydratase KdgD | | | |
| 369 | ybcD Aldehyde dehydrogenase YbcD | YcbD [Bacillus licheniformis DSM 13] | UniRef100_Q65NX0 | Bacillus licheniformis DSM 13 |
| 370 | gudP D-galactonate transporter | YcbE [Bacillus licheniformis DSM 13] | UniRef100_Q65NW9 | Bacillus licheniformis DSM 13 |
| 371 | gudD Mandelate racemase_muconate lactonizing | YcbF [Bacillus licheniformis DSM 13] | UniRef100_Q65NW8 | Bacillus licheniformis DSM 13 |
| | enzyme | | | |
| 372 | ycbG putative regulatory protein YcbG | YcbG [Bacillus licheniformis DSM 13] | UniRef100_Q65NW7 | Bacillus licheniformis DSM 13 |
| 373 | garD D-galactarate dehydratase_Altronate hydrolase, | YcbH [Bacillus licheniformis DSM 13] | UniRef100_Q65NW6 | Bacillus licheniformis DSM 13 |
| | N-terminal, D-galactarate dehydratase_Altronate | | | |
| | hydrolase, C-terminal | | | |
| 374 | ycbL YcbL | Hypothetical protein [Bacillus licheniformis DSM 13] | UniRef100_Q65NW5 | Bacillus licheniformis DSM 13 |
| 375 | ycbM putative sensor histidine kinase | HPr serine phosphorylation site [Bacillus licheniformis DSM | UniRef100_Q62ZB0 | Bacillus licheniformis DSM 13 |
| | | 13] | | |
| 376 | ycbN ABC transporter YcbN | YcbN [Bacillus licheniformis DSM 13] | UniRef100_Q65NW2 | Bacillus licheniformis DSM 13 |
| 377 | ycbO conserved hypothetical protein YcbO | YcbO [Bacillus licheniformis DSM 13] | UniRef100_Q65NW1 | Bacillus licheniformis DSM 13 |
| 378 | ycbO2 conserved hypothetical protein YcbO | | | |
| 379 | yetN conserved hypothetical protein YetN | Hypothetical protein yetN [Bacillus licheniformis DSM 13] | UniRef100_Q65NV9 | Bacillus licheniformis DSM 13 |
| 380 | ybdO conserved hypothetical protein YbdO | YbdO [Bacillus licheniformis DSM 13] | UniRef100_Q65NV8 | Bacillus licheniformis DSM 13 |
| 381 | BLP00347 hypothetical protein | | | |
| 382 | ycbJ putative Macrolide 2′-phosphotransferase | YcbJ [Bacillus licheniformis DSM 13] | UniRef100_Q65NV7 | Bacillus licheniformis DSM 13 |
| 383 | ywhA putative transcriptional regulator | YwhA [Bacillus licheniformis DSM 13] | UniRef100_Q65NV6 | Bacillus licheniformis DSM 13 |
| 384 | ydaB AMP-dependent synthetase and ligase | YdaB [Bacillus licheniformis DSM 13] | UniRef100_Q65NV5 | Bacillus licheniformis DSM 13 |
| 385 | BLP00351 putative Proteinase inhibititor I4, serpin | Hypothetical protein [Bacillus licheniformis DSM 13] | UniRef100_Q65NV4 | Bacillus licheniformis DSM 13 |
| 386 | BLP00352 unassigned | YbdN [Bacillus licheniformis DSM 13] | UniRef100_Q65NV3 | Bacillus licheniformis DSM 13 |
| 387 | BLP00353 hypothetical protein | Hypothetical protein [Bacillus licheniformis DSM 13] | UniRef100_Q65NV2 | Bacillus licheniformis DSM 13 |
| 388 | mtaB transcriptional regulator (MerR family) | Mta [Bacillus licheniformis DSM 13] | UniRef100_Q65NV1 | Bacillus licheniformis DSM 13 |
| 389 | BLP00355 hypothetical protein | Hypothetical protein [Bacillus licheniformis DSM 13] | UniRef100_Q65NV0 | Bacillus licheniformis DSM 13 |
| 390 | BLP00356 putative DNA binding protein | Hypothetical protein [Bacillus licheniformis DSM 13] | UniRef100_Q65NU9 | Bacillus licheniformis DSM 13 |
| 391 | BLP00357 hypothetical protein | Hypothetical protein [Bacillus licheniformis DSM 13] | UniRef100_Q65NU8 | Bacillus licheniformis DSM 13 |
| 392 | rtpA inhibitor of TRAP, regulated by T-BOX (trp) | YczA [Bacillus licheniformis DSM 13] | UniRef100_Q65NU7 | Bacillus licheniformis DSM 13 |
| | sequence RtpA | | | |
| 393 | ycbK hypothetical membrane protein YcbK | YcbK [Bacillus licheniformis DSM 13] | UniRef100_Q65NU6 | Bacillus licheniformis DSM 13 |
| 394 | yczC conserved membrane protein YczC | RDD [Bacillus licheniformis DSM 13] | UniRef100_Q62Z92 | Bacillus licheniformis DSM 13 |
| 395 | yccF conserved hypothetical protein YccF | YccF [Bacillus licheniformis DSM 13] | UniRef100_Q65NU4 | Bacillus licheniformis DSM 13 |
| 396 | spaF ABC transporter SpaF | Hypothetical protein [Bacillus licheniformis DSM 13] | UniRef100_Q65NU3 | Bacillus licheniformis DSM 13 |
| 397 | spaE SpaE | Hypothetical protein [Bacillus licheniformis DSM 13] | UniRef100_Q65NU2 | Bacillus licheniformis DSM 13 |
| 398 | spaG SpaG | Hypothetical protein [Bacillus licheniformis DSM 13] | UniRef100_Q65NU1 | Bacillus licheniformis DSM 13 |
| 399 | spaR SpaR | Hypothetical protein [Bacillus licheniformis DSM 13] | UniRef100_Q65NU0 | Bacillus licheniformis DSM 13 |
| 400 | spaK two-component sensor histidine kinase SpaK | Hypothetical protein [Bacillus licheniformis DSM 13] | UniRef100_Q65NT9 | Bacillus licheniformis DSM 13 |
| 401 | ytlI transcription regulatory protein YtlI | YtlI [Bacillus licheniformis DSM 13] | UniRef100_Q65NT8 | Bacillus licheniformis DSM 13 |
| 402 | yusQ 4-oxalocrotonate tautomerase YusQ | YusQ [Bacillus licheniformis DSM 13] | UniRef100_Q65NT7 | Bacillus licheniformis DSM 13 |
| 403 | yusR putative Short-chain dehydrogenase_reductase | Hypothetical protein [Bacillus licheniformis DSM 13] | UniRef100_Q65NT6 | Bacillus licheniformis DSM 13 |
| | YusR | | | |
| 404 | BLP00370 putative methyltransferase | Hypothetical protein (Hypothetical SAM (And some other | UniRef100_Q65NT5 | Bacillus licheniformis DSM 13 |
| | | nucleotide) binding motif, Generic methyltransferase) [Bacillus | | |
| | | licheniformis DSM 13] | | |
| 405 | ycdA putative lipoprotein YcdA | YcdA [Bacillus licheniformis DSM 13] | UniRef100_Q65NT4 | Bacillus licheniformis DSM 13 |
| 406 | ycgA C4-dicarboxylate anaerobic carrier YcgA | YcgA [Bacillus licheniformis DSM 13] | UniRef100_Q65NT3 | Bacillus licheniformis DSM 13 |
| 407 | hipO Peptidase M20D, amidohydrolase | Hypothetical protein [Bacillus licheniformis DSM 13] | UniRef100_Q65NT2 | Bacillus licheniformis DSM 13 |
| 408 | yvbK GCN5-related N-acetyltransferase | YvbK [Bacillus licheniformis DSM 13] | UniRef100_Q65NT1 | Bacillus licheniformis DSM 13 |
| 409 | BLP00375 glutamyl-tRNA(Gln) amidotransferase | Hypothetical protein [Bacillus licheniformis DSM 13] | UniRef100_Q65NT0 | Bacillus licheniformis DSM 13 |
| | (subunit A) | | | |
| 410 | BLP00376 neutral zinc metallopeptidase | Hypothetical protein [Bacillus licheniformis DSM 13] | UniRef100_Q65NS9 | Bacillus licheniformis DSM 13 |
| 411 | BLP00377 conserved membrane protein | Hypothetical protein [Bacillus licheniformis DSM 13] | UniRef100_Q65NS8 | Bacillus licheniformis DSM 13 |
| 412 | BLP00378 penicillin-binding protein | Hypothetical protein [Bacillus licheniformis DSM 13] | UniRef100_Q65NS7 | Bacillus licheniformis DSM 13 |
| 413 | ysfD 4Fe-4S ferredoxin, iron-sulfur binding domain | YsfD [Bacillus licheniformis DSM 13] | UniRef100_Q65NS6 | Bacillus licheniformis DSM 13 |
| 414 | ysfC Glycolate oxidase subunit GlcD | YsfC [Bacillus licheniformis DSM 13] | UniRef100_Q65NS5 | Bacillus licheniformis DSM 13 |
| 415 | BLP00381 hypothetical protein | | | |
| 416 | ydhM Phosphotransferase system, | Hypothetical protein [Bacillus licheniformis DSM 13] | UniRef100_Q65NS4 | Bacillus licheniformis DSM 13 |
| | lactose_cellobiose-specific IIB subunit | | | |
| 417 | BLP00383 phosphotransferase system (PTS) | Hypothetical protein (Phosphotransferase system (PTS) | UniRef100_Q65NS3 | Bacillus licheniformis DSM 13 |
| | lichenan-specific enzyme IIA component | lichenan-specific enzyme IIA component) [Bacillus | | |
| | | licheniformis DSM 13] | | |
| 418 | BLP00384 PTS lactose_cellobiose IIC | YwbA [Bacillus licheniformis DSM 13] | UniRef100_Q65NS2 | Bacillus licheniformis DSM 13 |
| | component, PTS system cellobiose-specific IIC | | | |
| | component | | | |
| 419 | BLP00385 Glycoside Hydrolase Family 4 | Hypothetical protein [Bacillus licheniformis DSM 13] | UniRef100_Q65NS1 | Bacillus licheniformis DSM 13 |
| 420 | BLP00386 transcriptional regulator, GntR family, | YurK [Bacillus licheniformis DSM 13] | UniRef100_Q65NS0 | Bacillus licheniformis DSM 13 |
| | conserved hypothetical protein | | | |
| 421 | BLP00387 conserved hypothetical protein | Hypothetical protein [Bacillus licheniformis DSM 13] | UniRef100_Q65NR9 | Bacillus licheniformis DSM 13 |
| 422 | BLP00388 hypothetical protein | | | |
| 423 | yvbX conserved protein, Glycoside Hydrolase Family | Hypothetical protein [Bacillus licheniformis DSM 13] | UniRef100_Q65NR8 | Bacillus licheniformis DSM 13 |
| | 18, YvbX | | | |
| 424 | BLP00390 Chitinase precursor, Glycoside Hydrolase | Chitodextrinase [Bacillus licheniformis] | UniRef100_Q65NR7 | Bacillus licheniformis |
| | Family 18 | | | |
| 425 | mpr Glutamyl Endo peptidase | Glutamyl endopeptidase precursor [Bacillus licheniformis] | UniRef100_P80057 | Bacillus licheniformis |
| 426 | ycdF Glucose 1-dehydrogenase II YcdF | YcdF [Bacillus licheniformis DSM 13] | UniRef100_Q65NR5 | Bacillus licheniformis DSM 13 |
| 427 | BLP00393 conserved hypothetical protein | Hypothetical protein [Bacillus licheniformis DSM 13] | UniRef100_Q65NR4 | Bacillus licheniformis DSM 13 |
| 428 | ycdC conserved hypothetical protein YcdC | YcdC [Bacillus licheniformis DSM 13] | UniRef100_Q65NR3 | Bacillus licheniformis DSM 13 |
| 429 | BLP00395 Thiosulfate sulfurtransferase | Hypothetical protein [Bacillus licheniformis DSM 13] | UniRef100_Q65NR2 | Bacillus licheniformis DSM 13 |
| 430 | cwlJ cell wall hydrolase | Hypothetical protein cwlJ [Bacillus licheniformis DSM 13] | UniRef100_Q65NR1 | Bacillus licheniformis DSM 13 |
| 431 | yceB putative monooxygenase YceB | Luciferase-like [Bacillus licheniformis DSM 13] | UniRef100_Q62Z57 | Bacillus licheniformis DSM 13 |
| 432 | BLP00398 hypothetical protein | | | |
| 433 | yvcE putative peptidoglycan hydrolase, DL- | YvcE [Bacillus licheniformis DSM 13] | UniRef100_Q65NQ9 | Bacillus licheniformis DSM 13 |
| | endopeptidase II family | | | |
| 434 | BLP00400 putative permease | Hypothetical protein [Bacillus licheniformis DSM 13] | UniRef100_Q65NQ8 | Bacillus licheniformis DSM 13 |
| 435 | BLP00401 ABC transporter | Hypothetical protein [Bacillus licheniformis DSM 13] | UniRef100_Q65NQ7 | Bacillus licheniformis DSM 13 |
| 436 | BLP00402 transcriptional regulator | Hypothetical protein [Bacillus licheniformis DSM 13] | UniRef100_Q65NQ6 | Bacillus licheniformis DSM 13 |
| 437 | BLP00403 hypothetical protein | Hypothetical protein [Bacillus licheniformis DSM 13] | UniRef100_Q65NQ5 | Bacillus licheniformis DSM 13 |
| 438 | BLP00404 hypothetical protein | Hypothetical protein [Bacillus licheniformis DSM 13] | UniRef100_Q65NQ4 | Bacillus licheniformis DSM 13 |
| 439 | BLP00405 transcriptional regulator | Hypothetical protein [Bacillus licheniformis DSM 13] | UniRef100_Q65NQ3 | Bacillus licheniformis DSM 13 |
| 440 | yceC putative stress response protein YceC | YceC [Bacillus licheniformis DSM 13] | UniRef100_Q65NQ2 | Bacillus licheniformis DSM 13 |
| 441 | yceD putative stress response protein YceD | YceD [Bacillus licheniformis DSM 13] | UniRef100_Q65NQ1 | Bacillus licheniformis DSM 13 |
| 442 | yceE putative stress response protein YceE | YceE [Bacillus licheniformis DSM 13] | UniRef100_Q65NQ0 | Bacillus licheniformis DSM 13 |
| 443 | yceF Integral membrane protein TerC family, YceF | YceF [Bacillus licheniformis DSM 13] | UniRef100_Q65NP9 | Bacillus licheniformis DSM 13 |
| 444 | BLP00410 Putative ATP_GTP-binding protein | Hypothetical protein [Bacillus licheniformis DSM 13] | UniRef100_Q65NP8 | Bacillus licheniformis DSM 13 |
| 445 | BLP00411 conserved hypothetical protein | Hypothetical protein [Bacillus licheniformis DSM 13] | UniRef100_Q65NP7 | Bacillus licheniformis DSM 13 |
| 446 | yceG conserved hypothetical protein YceG | YceG [Bacillus licheniformis DSM 13] | UniRef100_Q65NP6 | Bacillus licheniformis DSM 13 |
| 447 | yceH putative signal peptide binding protein YceH | YceH (Signal peptide binding (SRP54) M-domain) [Bacillus | UniRef100_Q65NP5 | Bacillus licheniformis DSM 13 |
| | | licheniformis DSM 13] | | |
| 448 | BLP00414 integral membrane protein | Hypothetical protein [Bacillus licheniformis DSM 13] | UniRef100_Q65NP4 | Bacillus licheniformis DSM 13 |
| 449 | BLP00415 conserved hypothetical protein | Hypothetical protein [Bacillus licheniformis DSM 13] | UniRef100_Q65NP3 | Bacillus licheniformis DSM 13 |
| 450 | mtaC transcriptional regulator | Hypothetical protein [Bacillus licheniformis DSM 13] | UniRef100_Q65NP2 | Bacillus licheniformis DSM 13 |
| 451 | nasA nitrate transporter | NasA [Bacillus licheniformis DSM 13] | UniRef100_Q65NP1 | Bacillus licheniformis DSM 13 |
| 452 | ldh L-lactate dehydrogenase | Ldh [Bacillus licheniformis DSM 13] | UniRef100_Q65NP0 | Bacillus licheniformis DSM 13 |
| 453 | lctP L-lactate permease | LctP [Bacillus licheniformis DSM 13] | UniRef100_Q65NN9 | Bacillus licheniformis DSM 13 |
| 454 | ycgF Lysine exporter protein YcgF | YcgF [Bacillus licheniformis DSM 13] | UniRef100_Q65NN8 | Bacillus licheniformis DSM 13 |
| 455 | ycgH Amino acid_polyamine transporter I YcgH | YcgH [Bacillus licheniformis DSM 13] | UniRef100_Q65NN7 | Bacillus licheniformis DSM 13 |
| 456 | nadE NH3-dependent NAD synthetase | NadE [Bacillus licheniformis DSM 13] | UniRef100_Q65NN6 | Bacillus licheniformis DSM 13 |
| 457 | aroK shikimate kinase | AroK [Bacillus licheniformis DSM 13] | UniRef100_Q65NN5 | Bacillus licheniformis DSM 13 |
| 458 | ycgL conserved hypothetical protein YcgL | YcgL [Bacillus licheniformis DSM 13] | UniRef100_Q65NN4 | Bacillus licheniformis DSM 13 |
| 459 | ycgM putative proline dehydrogenase YcgM | YcgM [Bacillus licheniformis DSM 13] | UniRef100_Q65NN3 | Bacillus licheniformis DSM 13 |
| 460 | ycgN delta-1-pyrroline-5-carboxylate dehydrogenase | YcgN [Bacillus licheniformis DSM 13] | UniRef100_Q65NN2 | Bacillus licheniformis DSM 13 |
| | 2 YcgN | | | |
| 461 | ycgO Na_solute symporter YcgO | Na+/solute symporter [Bacillus licheniformis DSM 13] | UniRef100_Q62Z29 | Bacillus licheniformis DSM 13 |
| 462 | ycgP YcgP | YcgP [Bacillus licheniformis DSM 13] | UniRef100_Q65NN0 | Bacillus licheniformis DSM 13 |
| 463 | ycgQ YcgQ | YcgQ [Bacillus licheniformis DSM 13] | UniRef100_Q65NM9 | Bacillus licheniformis DSM 13 |
| 464 | ycgR putative permease YcgR | Predicted permease [Bacillus licheniformis DSM 13] | UniRef100_Q62Z26 | Bacillus licheniformis DSM 13 |
| 465 | cah cephalosporin C deacetylase, Carbohydrate | Cah [Bacillus licheniformis DSM 13] | UniRef100_Q65NM7 | Bacillus licheniformis DSM 13 |
| | Esterase Family 7 | | | |
| 466 | BLP00432 putative transcriptional regulator | Hypothetical protein [Bacillus licheniformis DSM 13] | UniRef100_Q65NM6 | Bacillus licheniformis DSM 13 |
| 467 | BLP00433 conserved hypothetical protein | Hypothetical protein [Bacillus licheniformis DSM 13] | UniRef100_Q65NM5 | Bacillus licheniformis DSM 13 |
| 468 | BLP00434 hypothetical protein | Hypothetical protein [Bacillus licheniformis DSM 13] | UniRef100_Q65NM4 | Bacillus licheniformis DSM 13 |
| 469 | BLP00435 hypothetical protein | | | |
| 470 | yckA Amino acid ABC transporter, permease protein | YckA [Bacillus licheniformis DSM 13] | UniRef100_Q65NM3 | Bacillus licheniformis DSM 13 |
| | YckA | | | |
| 471 | yckB putative extracellular solute-binding protein | YckB [Bacillus licheniformis DSM 13] | UniRef100_Q65NM2 | Bacillus licheniformis DSM 13 |
| | YckB | | | |
| 472 | BLP00438 hypothetical protein | | | |
| 473 | BLP00439 NAD(P)H dehydrogenase | Hypothetical protein (NAD(P)H dehydrogenase) [Bacillus | UniRef100_Q65NM1 | Bacillus licheniformis DSM 13 |
| | | licheniformis DSM 13] | | |
| 474 | BLP00440 ABC transporter | Hypothetical protein [Bacillus licheniformis DSM 13] | UniRef100_Q65NM0 | Bacillus licheniformis DSM 13 |
| 475 | yckE putative Glycosyl Hydrolase Family 1 YckE | YckE [Bacillus licheniformis DSM 13] | UniRef100_Q65NL9 | Bacillus licheniformis DSM 13 |
| 476 | nin Nin | Hypothetical protein nin [Bacillus licheniformis DSM 13] | UniRef100_Q62Z16 | Bacillus licheniformis DSM 13 |
| 477 | nucA nuclease NucA | NucA [Bacillus licheniformis DSM 13] | UniRef100_Q65NL7 | Bacillus licheniformis DSM 13 |
| 478 | BLP00444 hypothetical protein | | | |
| 479 | tlpC Methyl-accepting chemotaxis protein tlpC TlpC | | | |
| 480 | ycqG Endoplasmic reticulum targeting sequence | Hypothetical protein [Bacillus licheniformis DSM 13] | UniRef100_Q65NL2 | Bacillus licheniformis DSM 13 |
| | YcqG | | | |
| 481 | BLP00447 Hydantoin utilization protein A | Hypothetical protein [Bacillus licheniformis DSM 13] | UniRef100_Q65NL1 | Bacillus licheniformis DSM 13 |
| 482 | BLP00448 Hydantoin utilization protein B | Hypothetical protein [Bacillus licheniformis DSM 13] | UniRef100_Q65NL0 | Bacillus licheniformis DSM 13 |
| 483 | BLP00449 putative extracellular solute-binding protein | Extracellular solute-binding protein, family 1 [Bacillus | UniRef100_Q62Z10 | Bacillus licheniformis DSM 13 |
| | | licheniformis DSM 13] | | |
| 484 | BLP00450 multiple sugar-binding transport ATP- | Hypothetical protein [Bacillus licheniformis DSM 13] | UniRef100_Q65NK8 | Bacillus licheniformis DSM 13 |
| | binding protein | | | |
| 485 | BLP00451 Binding-protein-dependent transport | Hypothetical protein [Bacillus licheniformis DSM 13] | UniRef100_Q65NK7 | Bacillus licheniformis DSM 13 |
| | systems inner membrane component | | | |
| 486 | BLP00452 Binding-protein-dependent transport | Hypothetical protein [Bacillus licheniformis DSM 13] | UniRef100_Q65NK6 | Bacillus licheniformis DSM 13 |
| | systems inner membrane component | | | |
| 487 | BLP00453 hypothetical protein | | | |
| 488 | BLP04698 hypothetical protein | | | |
| 489 | lchAA lichenysin synthetase A | Lichenysin synthetase A [Bacillus licheniformis DSM 13] | UniRef100_Q65NK5 | Bacillus licheniformis DSM 13 |
| 490 | lchAB lichenysin synthetase B | Lichenysin synthetase B [Bacillus licheniformis DSM 13] | UniRef100_Q65NK4 | Bacillus licheniformis DSM 13 |
| 491 | comS ComS | | | |
| 492 | lchAC lichenysin synthetase C | Lichenysin synthetase C [Bacillus licheniformis DSM 13] | UniRef100_Q65NK3 | Bacillus licheniformis DSM 13 |
| 493 | lchAD thioesterase LchAD | Lichenysin synthetase D [Bacillus licheniformis DSM 13] | UniRef100_Q65NK2 | Bacillus licheniformis DSM 13 |
| 494 | ycxC conserved membrane protein YcxC | Hypothetical protein ycxC [Bacillus licheniformis DSM 13] | UniRef100_Q65NK1 | Bacillus licheniformis DSM 13 |
| 495 | ycxD probable transcriptional regulator YcxD | YcxD [Bacillus licheniformis DSM 13] | UniRef100_Q65NK0 | Bacillus licheniformis DSM 13 |
| 496 | sfp phosphopantetheinyl transferase | Hypothetical protein [Bacillus licheniformis DSM 13] | UniRef100_Q65NJ9 | Bacillus licheniformis DSM 13 |
| 497 | ybbA Putative carbohydrate esterase, Family 1, YbbA | Hypothetical protein [Bacillus licheniformis DSM 13] | UniRef100_Q65NJ8 | Bacillus licheniformis DSM 13 |
| 498 | BLP00462 hypothetical protein | Transcriptional activator, AraC family [Bacillus cereus] | UniRef100_Q73CS4 | Bacillus cereus |
| 499 | yczE YczE | Hypothetical protein yczE [Bacillus licheniformis DSM 13] | UniRef100_Q65NJ6 | Bacillus licheniformis DSM 13 |
| 500 | BLP04844 conserved hypothetical protein | Hypothetical protein [Bacillus licheniformis DSM 13] | UniRef100_Q65NJ5 | Bacillus licheniformis DSM 13 |
| 501 | BLP00465 ABC transporter | Hypothetical protein [Bacillus licheniformis DSM 13] | UniRef100_Q65NJ4 | Bacillus licheniformis DSM 13 |
| 502 | BLP00466 putative transcriptional regulator | Hypothetical protein [Bacillus licheniformis DSM 13] | UniRef100_Q65NJ3 | Bacillus licheniformis DSM 13 |
| 503 | BLP00467 hypothetical protein | Hypothetical protein [Bacillus licheniformis DSM 13] | UniRef100_Q62YZ2 | Bacillus licheniformis DSM 13 |
| 504 | BLP00469 Putative L-2,4-diaminobutyrate | Hypothetical protein [Bacillus licheniformis DSM 13] | UniRef100_Q65NJ2 | Bacillus licheniformis DSM 13 |
| | decarboxylase | | | |
| 505 | BLP00470 methyl-accepting chemotaxis protein | Hypothetical protein [Bacillus licheniformis DSM 13] | UniRef100_Q65NJ1 | Bacillus licheniformis DSM 13 |
| 506 | yckI ABC transporter YckI | YckI [Bacillus licheniformis DSM 13] | UniRef100_Q65NJ0 | Bacillus licheniformis DSM 13 |
| 507 | yckJ ABC transporter permease protein YckJ | Amino acid ABC transporter, permease protein, 3-TM region, | UniRef100_Q62YY8 | Bacillus licheniformis DSM 13 |
| | | His/Glu/Gln/Arg/opine, Binding-protein-dependent transport | | |
| | | systems inner membrane component [Bacillus licheniformis | | |
| | | DSM 13] | | |
| 508 | yckK putative extracellular solute-binding protein, | YckK [Bacillus licheniformis DSM 13] | UniRef100_Q65NI8 | Bacillus licheniformis DSM 13 |
| | family 3 YckK | | | |
| 509 | rocR transcriptional activator of arginine utilization | RocR [Bacillus licheniformis DSM 13] | UniRef100_Q65NI7 | Bacillus licheniformis DSM 13 |
| | operons | | | |
| 510 | rocD ornithine aminotransferase | RocD [Bacillus licheniformis DSM 13] | UniRef100_Q65NI6 | Bacillus licheniformis DSM 13 |
| 511 | rocE amino acid permease | RocE [Bacillus licheniformis DSM 13] | UniRef100_Q65NI5 | Bacillus licheniformis DSM 13 |
| 512 | rocF arginase | RocF [Bacillus licheniformis DSM 13] | UniRef100_Q65NI4 | Bacillus licheniformis DSM 13 |
| 513 | yclA transcriptional regulator YclA | YclA [Bacillus licheniformis DSM 13] | UniRef100_Q65NI3 | Bacillus licheniformis DSM 13 |
| 514 | yclB 3-octaprenyl-4-hydroxybenzoate carboxy-lyase | YclB [Bacillus licheniformis DSM 13] | UniRef100_Q65NI2 | Bacillus licheniformis DSM 13 |
| | YclB | | | |
| 515 | yclC Carboxylyase-related protein YclC | YclC [Bacillus licheniformis DSM 13] | UniRef100_Q65NI1 | Bacillus licheniformis DSM 13 |
| 516 | BLP00481 hypothetical protein | Hypothetical protein [Bacillus licheniformis DSM 13] | UniRef100_Q65NI0 | Bacillus licheniformis DSM 13 |
| 517 | BLP00482 hypothetical protein | Hypothetical protein [Bacillus licheniformis DSM 13] | UniRef100_Q65NH9 | Bacillus licheniformis DSM 13 |
| 518 | BLP00483 hypothetical protein | Hypothetical protein [Bacillus licheniformis DSM 13] | UniRef100_Q65NH8 | Bacillus licheniformis DSM 13 |
| 519 | BLP00484 hypothetical protein | Hypothetical protein [Bacillus licheniformis DSM 13] | UniRef100_Q65NH7 | Bacillus licheniformis DSM 13 |
| 520 | BLP00485 hypothetical protein | Hypothetical protein [Bacillus licheniformis DSM 13] | UniRef100_Q65NH6 | Bacillus licheniformis DSM 13 |
| 521 | BLP00486 hypothetical protein | | | |
| 522 | BLP00487 hypothetical protein | Hypothetical protein [Bacillus licheniformis DSM 13] | UniRef100_Q65NH5 | Bacillus licheniformis DSM 13 |
| 523 | BLP00488 conserved hypothetical protein | Hypothetical protein [Bacillus licheniformis DSM 13] | UniRef100_Q65NH4 | Bacillus licheniformis DSM 13 |
| 524 | BLP00489 hypothetical protein | | | |
| 525 | BLP00490 hypothetical protein | Hypothetical protein [Bacillus licheniformis DSM 13] | UniRef100_Q65NH3 | Bacillus licheniformis DSM 13 |
| 526 | yxiD putative transposase protein YxiD | Hypothetical protein [Bacillus licheniformis DSM 13] | UniRef100_Q65NH2 | Bacillus licheniformis DSM 13 |
| 527 | yxiC YxiC | Hypothetical protein yxiC [Bacillus licheniformis DSM 13] | UniRef100_Q62YX1 | Bacillus licheniformis DSM 13 |
| 528 | yxiB putative prefoldin | Hypothetical protein [Bacillus licheniformis DSM 13] | UniRef100_Q65NH0 | Bacillus licheniformis DSM 13 |
| 529 | BLP00494 ribose ABC transporter (ribose-binding | Hypothetical protein [Bacillus licheniformis DSM 13] | UniRef100_Q65NG9 | Bacillus licheniformis DSM 13 |
| | protein) | | | |
| 530 | BLP00495 putative Histidine kinase | Hypothetical protein [Bacillus licheniformis DSM 13] | UniRef100_Q65NG8 | Bacillus licheniformis DSM 13 |
| 531 | BLP00496 transcriptional regulator | Hypothetical protein [Bacillus licheniformis DSM 13] | UniRef100_Q65NG7 | Bacillus licheniformis DSM 13 |
| 532 | BLP00497 ribose ABC transporter (ribose-binding | Hypothetical protein [Bacillus licheniformis DSM 13] | UniRef100_Q65NG6 | Bacillus licheniformis DSM 13 |
| | protein) | | | |
| 533 | BLP00498 sugar ABC transporter (ATP-binding | Hypothetical protein [Bacillus licheniformis DSM 13] | UniRef100_Q65NG5 | Bacillus licheniformis DSM 13 |
| | protein) | | | |
| 534 | BLP00499 sugar ABC transporter (permease) | Hypothetical protein [Bacillus licheniformis DSM 13] | UniRef100_Q65NG4 | Bacillus licheniformis DSM 13 |
| 535 | ybfB Major facilitator superfamily protein YbfB | YbfB [Bacillus licheniformis DSM 13] | UniRef100_Q65NG3 | Bacillus licheniformis DSM 13 |
| 536 | ybfA putative DNA binding protein YbfA | YbfA [Bacillus licheniformis DSM 13] | UniRef100_Q65NG2 | Bacillus licheniformis DSM 13 |
| 537 | BLP00502 hypothetical protein | | | |
| 538 | lacA2 Glycoside Hydrolase Family 42 | Hypothetical protein [Bacillus licheniformis DSM 13] | UniRef100_Q65NG1 | Bacillus licheniformis DSM 13 |
| 539 | phy phytase | PhyL [Bacillus licheniformis] | UniRef100_Q6DNH6 | Bacillus licheniformis |
| 540 | yclF putative oligo-peptide transporter YclF | YclF [Bacillus licheniformis DSM 13] | UniRef100_Q65NF9 | Bacillus licheniformis DSM 13 |
| 541 | BLP00506 conserved hypothetical protein | Hypothetical protein [Bacillus licheniformis DSM 13] | UniRef100_Q65NF8 | Bacillus licheniformis DSM 13 |
| 542 | yclG Pectin lyase-like protein | YclG [Bacillus licheniformis DSM 13] | UniRef100_Q65NF7 | Bacillus licheniformis DSM 13 |
| 543 | BLP00508 hypothetical protein | YczF [Bacillus licheniformis DSM 13] | UniRef100_Q65NF6 | Bacillus licheniformis DSM 13 |
| 544 | BLP00509 hypothetical protein | GerKA [Bacillus licheniformis DSM 13] | UniRef100_Q65NF5 | Bacillus licheniformis DSM 13 |
| 545 | gerKC GerKC | Hypothetical protein gerKC [Bacillus licheniformis DSM 13] | UniRef100_Q65NF4 | Bacillus licheniformis DSM 13 |
| 546 | gerKB GerKC | Hypothetical protein gerKB [Bacillus licheniformis DSM 13] | UniRef100_Q65NF3 | Bacillus licheniformis DSM 13 |
| 547 | mtaD transcriptional regulator (MerR family) | Hypothetical protein [Bacillus licheniformis DSM 13] | UniRef100_Q65NF2 | Bacillus licheniformis DSM 13 |
| 548 | yclH ABC transporter YclH | YclH [Bacillus licheniformis DSM 13] | UniRef100_Q65NF1 | Bacillus licheniformis DSM 13 |
| 549 | yclI hypothetical membrane protein YclI | YclI [Bacillus licheniformis DSM 13] | UniRef100_Q65NF0 | Bacillus licheniformis DSM 13 |
| 550 | yclJ hypothetical sensory transduction protein YclJ | YclJ [Bacillus licheniformis DSM 13] | UniRef100_Q65NE9 | Bacillus licheniformis DSM 13 |
| 551 | yclK Histidine kinase, homodimeric YclK | YclK [Bacillus licheniformis DSM 13] | UniRef100_Q65NE8 | Bacillus licheniformis DSM 13 |
| 552 | tlpA methyl-accepting chemotaxis protein | TlpA [Bacillus licheniformis DSM 13] | UniRef100_Q65NE7 | Bacillus licheniformis DSM 13 |
| 553 | BLP00518 hypothetical protein | | | |
| 554 | yclM Aspartate kinase YclM | YclM [Bacillus licheniformis DSM 13] | UniRef100_Q65NE6 | Bacillus licheniformis DSM 13 |
| 555 | yclN putative transport system permease protein | YclN [Bacillus licheniformis DSM 13] | UniRef100_Q65NE5 | Bacillus licheniformis DSM 13 |
| 556 | yclO putative transport system permease protein | YclO [Bacillus licheniformis DSM 13] | UniRef100_Q65NE4 | Bacillus licheniformis DSM 13 |
| 557 | yclP ABC transporter | YclP [Bacillus licheniformis DSM 13] | UniRef100_Q65NE3 | Bacillus licheniformis DSM 13 |
| 558 | yclQ Periplasmic binding protein | YclQ [Bacillus licheniformis DSM 13] | UniRef100_Q65NE2 | Bacillus licheniformis DSM 13 |
| 559 | ycnB Drug resistance transporter YcnB | YcnB [Bacillus licheniformis DSM 13] | UniRef100_Q65NE1 | Bacillus licheniformis DSM 13 |
| 560 | ycnC probable transcriptional regulator YcnC | YcnC [Bacillus licheniformis DSM 13] | UniRef100_Q65NE0 | Bacillus licheniformis DSM 13 |
| 561 | BLP00526 hypothetical protein | Hypothetical protein [Bacillus licheniformis DSM 13] | UniRef100_Q65ND9 | Bacillus licheniformis DSM 13 |
| 562 | nfrA2 NADPH-linked nitro_flavin reductase | YcnD [Bacillus licheniformis DSM 13] | UniRef100_Q65ND8 | Bacillus licheniformis DSM 13 |
| 563 | ycnE Dimeric alpha-beta barrel | YcnE [Bacillus licheniformis DSM 13] | UniRef100_Q65ND7 | Bacillus licheniformis DSM 13 |
| 564 | yczG putative transcriptional regulator YczG | YczG [Bacillus licheniformis DSM 13] | UniRef100_Q65ND6 | Bacillus licheniformis DSM 13 |
| 565 | gabR transcriptional regulator GabR | GabR [Bacillus licheniformis DSM 13] | UniRef100_Q65ND5 | Bacillus licheniformis DSM 13 |
| 566 | gabT 4-aminobutyrate aminotransferase | GabT [Bacillus licheniformis DSM 13] | UniRef100_Q65ND4 | Bacillus licheniformis DSM 13 |
| 567 | BLP00532 Amino acid_polyamine transporter I | YhdG [Bacillus licheniformis DSM 13] | UniRef100_Q65ND3 | Bacillus licheniformis DSM 13 |
| 568 | gabD succinate-semialdehyde dehydrogenase | GabD [Bacillus licheniformis DSM 13] | UniRef100_Q65ND2 | Bacillus licheniformis DSM 13 |
| 569 | ywfM conserved hypothetical protein YwfM | YwfM [Bacillus licheniformis DSM 13] | UniRef100_Q65ND1 | Bacillus licheniformis DSM 13 |
| 570 | BLP04699 hypothetical protein | | | |
| 571 | BLP00534 hypothetical protein | Hypothetical protein [Bacillus licheniformis DSM 13] | UniRef100_Q65ND0 | Bacillus licheniformis DSM 13 |
| 572 | ycnI conserved membrane protein | YcnI [Bacillus licheniformis DSM 13] | UniRef100_Q65NC9 | Bacillus licheniformis DSM 13 |
| 573 | ycnJ putative copper export protein YcnJ | YcnJ [Bacillus licheniformis DSM 13] | UniRef100_Q65NC8 | Bacillus licheniformis DSM 13 |
| 574 | ycnK probable transcriptional regulator YcnK | YcnK [Bacillus licheniformis DSM 13] | UniRef100_Q65NC7 | Bacillus licheniformis DSM 13 |
| 575 | BLP00538 hypothetical protein | | | |
| 576 | nasB assimilatory nitrate reductase (electron transfer | NasB [Bacillus licheniformis DSM 13] | UniRef100_Q65NC6 | Bacillus licheniformis DSM 13 |
| | subunit) | | | |
| 577 | nasC assimilatory nitrate reductase (catalytic subunit) | NasC [Bacillus licheniformis DSM 13] | UniRef100_Q65NC5 | Bacillus licheniformis DSM 13 |
| 578 | nasD assimilatory nitrite reductase (subunit) | NasD [Bacillus licheniformis DSM 13] | UniRef100_Q65NC4 | Bacillus licheniformis DSM 13 |
| 579 | nasE assimilatory nitrite reductase (subunit) | NasE [Bacillus licheniformis DSM 13] | UniRef100_Q65NC3 | Bacillus licheniformis DSM 13 |
| 580 | nasF uroporphyrin-III C-methyltransferase | NasF [Bacillus licheniformis DSM 13] | UniRef100_Q65NC2 | Bacillus licheniformis DSM 13 |
| 581 | BLP04700 hypothetical protein | | | |
| 582 | BLP00544 putative regulatory protein | YdhC [Bacillus licheniformis DSM 13] | UniRef100_Q65NC1 | Bacillus licheniformis DSM 13 |
| 583 | BLP00545 Sodium_sulphate symporter | Hypothetical protein [Bacillus licheniformis DSM 13] | UniRef100_Q65NC0 | Bacillus licheniformis DSM 13 |
| 584 | BLP00546 hypothetical protein | Hypothetical protein [Bacillus licheniformis DSM 13] | UniRef100_Q65NB9 | Bacillus licheniformis DSM 13 |
| 585 | BLP00547 conserved hypothetical protein | Hypothetical protein [Bacillus licheniformis DSM 13] | UniRef100_Q65NB7 | Bacillus licheniformis DSM 13 |
| 586 | BLP00548 transcriptional regulator | Hypothetical protein [Bacillus licheniformis DSM 13] | UniRef100_Q65NB6 | Bacillus licheniformis DSM 13 |
| 587 | BLP00549 putative sugar phosphotransferase | Hypothetical protein [Bacillus licheniformis DSM 13] | UniRef100_Q65NB5 | Bacillus licheniformis DSM 13 |
| 588 | BLP00550 putative sugar phosphotransferase system | Hypothetical protein [Bacillus licheniformis DSM 13] | UniRef100_Q65NB4 | Bacillus licheniformis DSM 13 |
| | protein | | | |
| 589 | tktA transketolase | Hypothetical protein [Bacillus licheniformis DSM 13] | UniRef100_Q65NB3 | Bacillus licheniformis DSM 13 |
| 590 | BLP00552 1-deoxyxylulose-5-phosphate synthase | Hypothetical protein [Bacillus licheniformis DSM 13] | UniRef100_Q65NB2 | Bacillus licheniformis DSM 13 |
| 591 | ycsE putative hydrolase YcsE | YcsE [Bacillus licheniformis DSM 13] | UniRef100_Q65NB1 | Bacillus licheniformis DSM 13 |
| 592 | BLP00554 hypothetical protein | | | |
| 593 | ycsF putative lactam utilization protein YcsF | YcsF [Bacillus licheniformis DSM 13] | UniRef100_Q65NB0 | Bacillus licheniformis DSM 13 |
| 594 | ycsG putative branched chain amino acids transporter | Hypothetical protein ycsG [Bacillus licheniformis DSM 13] | UniRef100_Q65NA9 | Bacillus licheniformis DSM 13 |
| | YcsG | | | |
| 595 | ycsI conserved protein YcsI | Hypothetical protein ycsI [Bacillus licheniformis DSM 13] | UniRef100_Q65NA8 | Bacillus licheniformis DSM 13 |
| 596 | kipI kinase inhibitor KipI | Hypothetical protein kipI [Bacillus licheniformis DSM 13] | UniRef100_Q65NA7 | Bacillus licheniformis DSM 13 |
| 597 | kipA KipA | Hypothetical protein kipA [Bacillus licheniformis DSM 13] | UniRef100_Q65NA6 | Bacillus licheniformis DSM 13 |
| 598 | kipR transcriptional regulator KipR | KipR [Bacillus licheniformis DSM 13] | UniRef100_Q65NA5 | Bacillus licheniformis DSM 13 |
| 599 | ycsK Lipolytic enzyme, G-D-S-L | YcsK [Bacillus licheniformis DSM 13] | UniRef100_Q65NA4 | Bacillus licheniformis DSM 13 |
| 600 | BLP00562 hypothetical protein | MtlA [Bacillus licheniformis DSM 13] | UniRef100_Q65NA3 | Bacillus licheniformis DSM 13 |
| 601 | mtlD mannitol-1-phosphate dehydrogenase | MtlD [Bacillus licheniformis DSM 13] | UniRef100_Q65NA1 | Bacillus licheniformis DSM 13 |
| 602 | mtlR transcriptional regulator MtlR | MtlR [Bacillus licheniformis DSM 13] | UniRef100_Q65NA0 | Bacillus licheniformis DSM 13 |
| 603 | ydaD putative Short-chain dehydrogenase_reductase | YdaD [Bacillus licheniformis DSM 13] | UniRef100_Q65N99 | Bacillus licheniformis DSM 13 |
| | YdaD | | | |
| 604 | ydaE YdaE | YdaE [Bacillus licheniformis DSM 13] | UniRef100_Q65N98 | Bacillus licheniformis DSM 13 |
| 605 | BLP00567 hypothetical protein | Hypothetical protein [Bacillus licheniformis DSM 13] | UniRef100_Q65N97 | Bacillus licheniformis DSM 13 |
| 606 | ydaG FMN-binding split barrel domain protein YdaG | YdaG [Bacillus licheniformis DSM 13] | UniRef100_Q65N96 | Bacillus licheniformis DSM 13 |
| 607 | BLP00569 hypothetical protein | | | |
| 608 | ydaH conserved membrane protein YdaH | Hypothetical protein ydaH [Bacillus licheniformis DSM 13] | UniRef100_Q65N95 | Bacillus licheniformis DSM 13 |
| 609 | BLP00571 Cell envelope-related transcriptional | Hypothetical protein [Bacillus licheniformis DSM 13] | UniRef100_Q65N94 | Bacillus licheniformis DSM 13 |
| | attenuator | | | |
| 610 | ydzA conserved membrane protein YdzA | Hypothetical protein ydzA [Bacillus licheniformis DSM 13] | UniRef100_Q65N93 | Bacillus licheniformis DSM 13 |
| 611 | BLP00573 hypothetical protein | Hypothetical protein [Bacillus licheniformis DSM 13] | UniRef100_Q65N92 | Bacillus licheniformis DSM 13 |
| 612 | lrpC transcriptional regulator (Lrp_AsnC family) | LrpC [Bacillus licheniformis DSM 13] | UniRef100_Q65N91 | Bacillus licheniformis DSM 13 |
| 613 | topB DNA topoisomerase III | TopB [Bacillus licheniformis DSM 13] | UniRef100_Q65N90 | Bacillus licheniformis DSM 13 |
| 614 | BLP00576 hypothetical protein | Hypothetical protein [Bacillus licheniformis DSM 13] | UniRef100_Q62YP3 | Bacillus licheniformis DSM 13 |
| 615 | BLP00577 hypothetical protein | Hypothetical protein [Bacillus licheniformis DSM 13] | UniRef100_Q62YP2 | Bacillus licheniformis DSM 13 |
| 616 | BLP04921 conserved hypothetical protein | Hypothetical protein [Bacillus licheniformis DSM 13] | UniRef100_Q62YP1 | Bacillus licheniformis DSM 13 |
| 617 | ydaO putative amino acid permease | YdaO [Bacillus licheniformis DSM 13] | UniRef100_Q65N89 | Bacillus licheniformis DSM 13 |
| 618 | BLP00579 hypothetical protein | | | |
| 619 | ydaP Pyruvate decarboxylase | YdaP [Bacillus licheniformis DSM 13] | UniRef100_Q65N88 | Bacillus licheniformis DSM 13 |
| 620 | BLP00581 putative chitin binding protein | Hypothetical protein [Bacillus licheniformis DSM 13] | UniRef100_Q65N87 | Bacillus licheniformis DSM 13 |
| 621 | BLP00582 hypothetical protein | | | |
| 622 | BLP00583 hypothetical protein | Hypothetical protein [Bacillus licheniformis DSM 13] | UniRef100_Q62YN4 | Bacillus licheniformis DSM 13 |
| 623 | ydaF GCN5-related N-acetyltransferase | YdaF [Bacillus licheniformis DSM 13] | UniRef100_Q65N83 | Bacillus licheniformis DSM 13 |
| 624 | mntH manganese transporter | MntH [Bacillus licheniformis DSM 13] | UniRef100_Q65N82 | Bacillus licheniformis DSM 13 |
| 625 | ydaS Transglycosylase-associated protein | YdaS [Bacillus licheniformis DSM 13] | UniRef100_Q65N81 | Bacillus licheniformis DSM 13 |
| 626 | ansB L-aspartase AnsB | AnsB [Bacillus licheniformis DSM 13] | UniRef100_Q65N80 | Bacillus licheniformis DSM 13 |
| 627 | BLP04701 hypothetical protein | | | |
| 628 | BLP00588 hypothetical protein | | | |
| 629 | yojK Glycosyl Transferase Family 1 | YojK [Bacillus licheniformis DSM 13] | UniRef100_Q65N79 | Bacillus licheniformis DSM 13 |
| 630 | ydaT conserved protein YdaT | Hypothetical protein ydaT [Bacillus licheniformis DSM 13] | UniRef100_Q65N78 | Bacillus licheniformis DSM 13 |
| 631 | BLP00591 hypothetical protein | | | |
| 632 | ydbA YdbA | YdbA [Bacillus licheniformis DSM 13] | UniRef100_Q65N77 | Bacillus licheniformis DSM 13 |
| 633 | BLP00593 Na_H antiporter | Hypothetical protein [Bacillus licheniformis DSM 13] | UniRef100_Q65N76 | Bacillus licheniformis DSM 13 |
| 634 | ydbB conserved protein YdbB | YdbB [Bacillus licheniformis DSM 13] | UniRef100_Q65N75 | Bacillus licheniformis DSM 13 |
| 635 | gsiB general stress protein | GsiB [Bacillus licheniformis DSM 13] | UniRef100_Q65N74 | Bacillus licheniformis DSM 13 |
| 636 | ydbI conserved membrane protein YdbI | Hypothetical protein ydbI [Bacillus licheniformis DSM 13] | UniRef100_Q65N73 | Bacillus licheniformis DSM 13 |
| 637 | BLP00597 proton_sodium-glutamate symport protein | Hypothetical protein [Bacillus licheniformis DSM 13] | UniRef100_Q65N72 | Bacillus licheniformis DSM 13 |
| 638 | ydbJ ABC transporter | YdbJ [Bacillus licheniformis DSM 13] | UniRef100_Q65N71 | Bacillus licheniformis DSM 13 |
| 639 | ydbK probable ABC transport system permease | Hypothetical protein ydbK [Bacillus licheniformis DSM 13] | UniRef100_Q62YM0 | Bacillus licheniformis DSM 13 |
| | protein YdbK | | | |
| 640 | ydbL YdbL | Hypothetical protein ydbL [Bacillus licheniformis DSM 13] | UniRef100_Q65N69 | Bacillus licheniformis DSM 13 |
| 641 | ydbM putative Acyl-CoA dehydrogenase YdbM | YdbM [Bacillus licheniformis DSM 13] | UniRef100_Q65N68 | Bacillus licheniformis DSM 13 |
| 642 | ydbN small antisense RNA YdbN | Hypothetical protein ydbN [Bacillus licheniformis DSM 13] | UniRef100_Q65N67 | Bacillus licheniformis DSM 13 |
| 643 | BLP00603 hypothetical protein | Hypothetical protein [Bacillus licheniformis DSM 13] | UniRef100_Q62YL6 | Bacillus licheniformis DSM 13 |
| 644 | ydbP putative thiredoxin protein YdpP | YdbP [Bacillus licheniformis DSM 13] | UniRef100_Q65N66 | Bacillus licheniformis DSM 13 |
| 645 | ddl D-alanyl-D-alanine ligase A | Ddl [Bacillus licheniformis DSM 13] | UniRef100_Q65N65 | Bacillus licheniformis DSM 13 |
| 646 | murF UDP-N-acetylmuramoylalanyl-D-glutamyl-2,6- | MurF [Bacillus licheniformis DSM 13] | UniRef100_Q65N64 | Bacillus licheniformis DSM 13 |
| | diaminopimelate-D-alanyl-D-alanine ligase | | | |
| 647 | BLP00607 Esterase_lipase_thioesterase | Hypothetical protein [Bacillus licheniformis DSM 13] | UniRef100_Q65N63 | Bacillus licheniformis DSM 13 |
| 648 | ydbR probable ATP-dependent RNA helicase YdbR | YdbR [Bacillus licheniformis DSM 13] | UniRef100_Q65N62 | Bacillus licheniformis DSM 13 |
| 649 | ydbS conserved membrane protein YdbS | YdbS [Bacillus licheniformis DSM 13] | UniRef100_Q65N61 | Bacillus licheniformis DSM 13 |
| 650 | ydbT conserved membrane protein | YdbT [Bacillus licheniformis DSM 13] | UniRef100_Q65N60 | Bacillus licheniformis DSM 13 |
| 651 | ydcA conserved membrane protein YdcA | YdcA [Bacillus licheniformis DSM 13] | UniRef100_Q65N59 | Bacillus licheniformis DSM 13 |
| 652 | ydcC conserved membrane protein YdcC | YdcC [Bacillus licheniformis DSM 13] | UniRef100_Q65N58 | Bacillus licheniformis DSM 13 |
| 653 | dal D-alanine racemase | Alr [Bacillus licheniformis DSM 13] | UniRef100_Q65N57 | Bacillus licheniformis DSM 13 |
| 654 | endoAl transcriptional inhibitor endoAl | YdcD [Bacillus licheniformis DSM 13] | UniRef100_Q65N56 | Bacillus licheniformis DSM 13 |
| 655 | endoA putative RNase | YdcE [Bacillus licheniformis DSM 13] | UniRef100_Q65N55 | Bacillus licheniformis DSM 13 |
| 656 | rsbR RbsR | Hypothetical protein rsbR [Bacillus licheniformis DSM 13] | UniRef100_Q65N54 | Bacillus licheniformis DSM 13 |
| 657 | rsbS antagonist of RsbT | RsbS [Bacillus licheniformis DSM 13] | UniRef100_Q65N53 | Bacillus licheniformis DSM 13 |
| 658 | rsbT switch protein_serine-threonine kinase | RsbT [Bacillus licheniformis DSM 13] | UniRef100_Q65N52 | Bacillus licheniformis DSM 13 |
| 659 | rsbU serine phosphatase | RsbU [Bacillus licheniformis DSM 13] | UniRef100_Q65N51 | Bacillus licheniformis DSM 13 |
| 660 | rsbV anti-anti-sigma factor (antagonist of RsbW) | RsbV [Bacillus licheniformis DSM 13] | UniRef100_Q65N50 | Bacillus licheniformis DSM 13 |
| 661 | rsbW switch protein_serine kinase and anti-sigma | RsbW [Bacillus licheniformis DSM 13] | UniRef100_Q65N49 | Bacillus licheniformis DSM 13 |
| | factor (inhibitory sigma-B binding protein) | | | |
| 662 | sigB RNA polymerase sigma-37 factor (sigma-B) | SigB [Bacillus licheniformis DSM 13] | UniRef100_Q65N48 | Bacillus licheniformis DSM 13 |
| 663 | rsbX serine phosphatase | RsbX [Bacillus licheniformis DSM 13] | UniRef100_Q65N47 | Bacillus licheniformis DSM 13 |
| 664 | ydcI putative RNA binding protein containing S1 RNA | RuvA domain 2-like, Nucleic acid-binding OB-fold [Bacillus | UniRef100_Q62YJ5 | Bacillus licheniformis DSM 13 |
| | binding domain, YdcI | licheniformis DSM 13] | | |
| 665 | BLP00625 hypothetical protein | TetR [Bacillus licheniformis DSM 13] | UniRef100_Q65N45 | Bacillus licheniformis DSM 13 |
| 666 | BLP04703 hypothetical protein | | | |
| 667 | ydgH conserved hypothetical protein YdgH | YdgH [Bacillus licheniformis DSM 13] | UniRef100_Q65N44 | Bacillus licheniformis DSM 13 |
| 668 | ydcK conserved protein YdcK | Hypothetical protein ydcK [Bacillus licheniformis DSM 13] | UniRef100_Q65N43 | Bacillus licheniformis DSM 13 |
| 669 | BLP00628 hypothetical protein | Hypothetical protein [Bacillus licheniformis DSM 13] | UniRef100_Q65N41 | Bacillus licheniformis DSM 13 |
| 670 | BLP00629 hypothetical protein | Hypothetical protein [Bacillus licheniformis DSM 13] | UniRef100_Q65N40 | Bacillus licheniformis DSM 13 |
| 671 | BLP00630 fatty acid desaturase | Hypothetical protein [Bacillus licheniformis DSM 13] | UniRef100_Q65N39 | Bacillus licheniformis DSM 13 |
| 672 | BLP00631 hypothetical protein | CspC [Bacillus licheniformis DSM 13] | UniRef100_Q65N38 | Bacillus licheniformis DSM 13 |
| 673 | cspC cold-shock protein | CspC [Bacillus licheniformis DSM 13] | UniRef100_Q65N37 | Bacillus licheniformis DSM 13 |
| 674 | BLP00633 hypothetical protein | GroES-like [Bacillus licheniformis DSM 13] | UniRef100_Q62YI5 | Bacillus licheniformis DSM 13 |
| 675 | yyaS conserved membrane protein YyaS | Hypothetical protein yyaS [Bacillus licheniformis DSM 13] | UniRef100_Q65N35 | Bacillus licheniformis DSM 13 |
| 676 | yybA negative regulator of yyaTS —YybA | YybA [Bacillus licheniformis DSM 13] | UniRef100_Q65N34 | Bacillus licheniformis DSM 13 |
| 677 | paiA transcriptional regulator PaiA | PaiA [Bacillus licheniformis DSM 13] | UniRef100_Q65N33 | Bacillus licheniformis DSM 13 |
| 678 | paiB transcriptional regulator | PaiB [Bacillus licheniformis DSM 13] | UniRef100_Q65N32 | Bacillus licheniformis DSM 13 |
| 679 | BLP00638 arginase | Hypothetical protein [Bacillus licheniformis DSM 13] | UniRef100_Q65N31 | Bacillus licheniformis DSM 13 |
| 680 | BLP00639 putative carboxy-lyase | Hypothetical protein [Bacillus licheniformis DSM 13] | UniRef100_Q65N30 | Bacillus licheniformis DSM 13 |
| 681 | ydeO conserved hypothetical protein YdeO | YdeO [Bacillus licheniformis DSM 13] | UniRef100_Q65N29 | Bacillus licheniformis DSM 13 |
| 682 | BLP00641 Lysine exporter protein | LysE [Bacillus licheniformis DSM 13] | UniRef100_Q65N28 | Bacillus licheniformis DSM 13 |
| 683 | BLP00642 putative regulatory protein | Hypothetical protein [Bacillus licheniformis DSM 13] | UniRef100_Q65N27 | Bacillus licheniformis DSM 13 |
| 684 | BLP00643 hypothetical protein | Hypothetical protein [Bacillus licheniformis DSM 13] | UniRef100_Q65N26 | Bacillus licheniformis DSM 13 |
| 685 | BLP00645 Major facilitator superfamily, transporter | Hypothetical protein [Bacillus licheniformis DSM 13] | UniRef100_Q65N25 | Bacillus licheniformis DSM 13 |
| 686 | BLP00646 hypothetical protein | Hypothetical protein [Bacillus licheniformis DSM 13] | UniRef100_Q65N24 | Bacillus licheniformis DSM 13 |
| 687 | ydgF Amino acid permease YdgF | YdgF [Bacillus licheniformis DSM 13] | UniRef100_Q65N23 | Bacillus licheniformis DSM 13 |
| 688 | BLP04706 hypothetical protein | | | |
| 689 | BLP00648 hypothetical protein | Hypothetical protein [Bacillus licheniformis DSM 13] | UniRef100_Q65N22 | Bacillus licheniformis DSM 13 |
| 690 | BLP00649 hypothetical protein | Hypothetical protein [Bacillus licheniformis DSM 13] | UniRef100_Q65N21 | Bacillus licheniformis DSM 13 |
| 691 | BLP00650 hypothetical protein | | | |
| 692 | sigV RNA polymerase ECF(extracytoplasmic | SigV (RNA polymerase ECF(Extracytoplasmic function)-type | UniRef100_Q65N20 | Bacillus licheniformis DSM 13 |
| | function)-type sigma factor (sigma-V) | sigma factor) [Bacillus licheniformis DSM 13] | | |
| 693 | yrhM YrhM | Hypothetical protein yrhM [Bacillus licheniformis DSM 13] | UniRef100_Q65N19 | Bacillus licheniformis DSM 13 |
| 694 | yrhL ABC transporter | YrhL [Bacillus licheniformis DSM 13] | UniRef100_Q65N18 | Bacillus licheniformis DSM 13 |
| 695 | ydgK putative Drug resistance transporter | YdgK [Bacillus licheniformis DSM 13] | UniRef100_Q65N17 | Bacillus licheniformis DSM 13 |
| 696 | ywpD two-component sensor histidine kinase | YwpD [Bacillus licheniformis DSM 13] | UniRef100_Q65N16 | Bacillus licheniformis DSM 13 |
| 697 | BLP00656 two-component response regulator | Hypothetical protein [Bacillus licheniformis DSM 13] | UniRef100_Q65N15 | Bacillus licheniformis DSM 13 |
| 698 | BLP00657 LPXTG-motif containing, cell wall anchor | Hypothetical Surface protein from Gram-positive cocci, | UniRef100_Q65N14 | Bacillus licheniformis DSM 13 |
| | domain protein | anchor region [Bacillus licheniformis DSM 13] | | |
| 699 | BLP00658 hypothetical protein | | | |
| 700 | ywpE conserved protein YwpE | Hypothetical protein [Bacillus licheniformis DSM 13] | UniRef100_Q65N13 | Bacillus licheniformis DSM 13 |
| 701 | BLP00660 hypothetical protein | | | |
| 702 | BLP00661 hypothetical protein | | | |
| 703 | iolT major inositol transport protein IolT | YdjK [Bacillus licheniformis DSM 13] | UniRef100_Q65N12 | Bacillus licheniformis DSM 13 |
| 704 | thiL thiamine-monophosphate kinase | ThiL [Bacillus licheniformis DSM 13] | UniRef100_Q65N11 | Bacillus licheniformis DSM 13 |
| 705 | ydiB hypothetical conserved protein YdiB | YdiB [Bacillus licheniformis DSM 13] | UniRef100_Q65N10 | Bacillus licheniformis DSM 13 |
| 706 | ydiC Peptidase M22, glycoprotease YdiC | YdiC [Bacillus licheniformis DSM 13] | UniRef100_Q65N09 | Bacillus licheniformis DSM 13 |
| 707 | ydiD Ribosomal-protein-alanine acetyltransferase | YdiD [Bacillus licheniformis DSM 13] | UniRef100_Q65N08 | Bacillus licheniformis DSM 13 |
| | YdiD | | | |
| 708 | gcp O-sialoglycoprotein endopeptidase | Gcp [Bacillus licheniformis DSM 13] | UniRef100_Q65N07 | Bacillus licheniformis DSM 13 |
| 709 | ydiF ABC transporter YdiF | YdiF [Bacillus licheniformis DSM 13] | UniRef100_Q65N06 | Bacillus licheniformis DSM 13 |
| 710 | BLP00669 hypothetical protein | | | |
| 711 | moaC Molybdopterin cofactor biosynthesis protein | YdiG [Bacillus licheniformis DSM 13] | UniRef100_Q65N05 | Bacillus licheniformis DSM 13 |
| | MoaC | | | |
| 712 | rex redox regulator Rex | YdiH [Bacillus licheniformis DSM 13] | UniRef100_Q65N04 | Bacillus licheniformis DSM 13 |
| 713 | tatAY component of the twin-arginine pre-protein | TatAY [Bacillus licheniformis DSM 13] | UniRef100_Q65N03 | Bacillus licheniformis DSM 13 |
| | translocation pathway | | | |
| 714 | tatCY component of the twin-arginine pre-protein | TatCY [Bacillus licheniformis DSM 13] | UniRef100_Q65N02 | Bacillus licheniformis DSM 13 |
| | translocation pathway | | | |
| 715 | ydiK YdiK | YdiK [Bacillus licheniformis DSM 13] | UniRef100_Q65N01 | Bacillus licheniformis DSM 13 |
| 716 | ydiL Aldo_keto reductase | YdiL [Bacillus licheniformis DSM 13] | UniRef100_Q65N00 | Bacillus licheniformis DSM 13 |
| 717 | groES class I heat-shock protein (chaperonin) | GroES [Bacillus licheniformis DSM 13] | UniRef100_Q65MZ9 | Bacillus licheniformis DSM 13 |
| 718 | groEL class I heat-shock protein (chaperonin) | GroEL [Bacillus licheniformis DSM 13] | UniRef100_Q65MZ8 | Bacillus licheniformis DSM 13 |
| 719 | BLP04707 hypothetical protein | | | |
| 720 | BLP04846 conserved hypothetical protein | Hypothetical Sugar transporter superfamily [Bacillus | UniRef100_Q62YE4 | Bacillus licheniformis DSM 13 |
| | | licheniformis DSM 13] | | |
| 721 | BLP00678 hypothetical protein | Hypothetical protein [Bacillus licheniformis DSM 13] | UniRef100_Q62YE3 | Bacillus licheniformis DSM 13 |
| 722 | BLP00679 hypothetical protein | Hypothetical protein [Bacillus licheniformis DSM 13] | UniRef100_Q62YE2 | Bacillus licheniformis DSM 13 |
| 723 | BLP00680 hypothetical protein | Hypothetical protein [Bacillus licheniformis DSM 13] | UniRef100_Q62YE0 | Bacillus licheniformis DSM 13 |
| 724 | yoaR conserved protein YoaR | YoaR [Bacillus licheniformis DSM 13] | UniRef100_Q65MZ6 | Bacillus licheniformis DSM 13 |
| 725 | yfmQ conserved hypothetical protein YfmQ | YfmQ [Bacillus licheniformis DSM 13] | UniRef100_Q65MZ5 | Bacillus licheniformis DSM 13 |
| 726 | BLP00683 hypothetical protein | | | |
| 727 | BLP00684 hypothetical protein | Hypothetical protein [Bacillus licheniformis DSM 13] | UniRef100_Q65MZ4 | Bacillus licheniformis DSM 13 |
| 728 | yoqW YoqW | YoqW [Bacillus licheniformis DSM 13] | UniRef100_Q65MZ3 | Bacillus licheniformis DSM 13 |
| 729 | BLP00686 conserved hypothetical | Hypothetical protein [Bacillus licheniformis DSM 13] | UniRef100_Q65G40 | Bacillus licheniformis DSM 13 |
| 730 | BLP00687 putative regulatory protein | Hypothetical protein [Bacillus licheniformis DSM 13] | UniRef100_Q65MZ2 | Bacillus licheniformis DSM 13 |
| 731 | BLP00688 phosphoenolpyruvate synthase | Hypothetical protein [Bacillus licheniformis DSM 13] | UniRef100_Q65MZ1 | Bacillus licheniformis DSM 13 |
| 732 | yoaF YoaF | Hypothetical protein yoaF [Bacillus licheniformis DSM 13] | UniRef100_Q65MZ0 | Bacillus licheniformis DSM 13 |
| 733 | BLP00690 conserved hypothetical protein | Hypothetical protein [Bacillus licheniformis DSM 13] | UniRef100_Q65MY9 | Bacillus licheniformis DSM 13 |
| 734 | BLP00691 hypothetical protein | | | |
| 735 | dltE DltE | Hypothetical protein dltE [Bacillus licheniformis DSM 13] | UniRef100_Q65MY8 | Bacillus licheniformis DSM 13 |
| 736 | pnbA para-nitrobenzyl esterase (intracellular esterase | PnbA [Bacillus licheniformis DSM 13] | UniRef100_Q65MY7 | Bacillus licheniformis DSM 13 |
| | B) | | | |
| 737 | BLP00694 inositol transport protein | Hypothetical protein [Bacillus licheniformis DSM 13] | UniRef100_Q65MY6 | Bacillus licheniformis DSM 13 |
| 738 | pspA phage shock protein A homolog | PspA [Bacillus licheniformis DSM 13] | UniRef100_Q65MY5 | Bacillus licheniformis DSM 13 |
| 739 | ydjG conserved protein YdjG | Hypothetical protein ydjG [Bacillus licheniformis DSM 13] | UniRef100_Q65MY4 | Bacillus licheniformis DSM 13 |
| 740 | ydjH conserved membrane protein YdjH | Hypothetical protein ydjH [Bacillus licheniformis DSM 13] | UniRef100_Q65MY3 | Bacillus licheniformis DSM 13 |
| 741 | ydjI conserved protein YdjI | Hypothetical protein ydjI [Bacillus licheniformis DSM 13] | UniRef100_Q65MY2 | Bacillus licheniformis DSM 13 |
| 742 | BLP00699 putative oxidoreductase | Hypothetical protein [Bacillus licheniformis DSM 13] | UniRef100_Q65MY1 | Bacillus licheniformis DSM 13 |
| 743 | yrhO putative cyclodextrin metabolism protein YrhO | YrhO [Bacillus licheniformis DSM 13] | UniRef100_Q65MY0 | Bacillus licheniformis DSM 13 |
| 744 | yrhP Lysine exporter protein YrhP | YrhP [Bacillus licheniformis DSM 13] | UniRef100_Q65MX9 | Bacillus licheniformis DSM 13 |
| 745 | ykvA2 conserved membrane protein | Hypothetical protein [Bacillus licheniformis DSM 13] | UniRef100_Q65MX8 | Bacillus licheniformis DSM 13 |
| 746 | BLP00703 sporulation related protein Stage V protein E | Hypothetical protein [Bacillus licheniformis DSM 13] | UniRef100_Q65MX7 | Bacillus licheniformis DSM 13 |
| 747 | BLP00704 cell-division protein | Hypothetical protein [Bacillus licheniformis DSM 13] | UniRef100_Q65MX6 | Bacillus licheniformis DSM 13 |
| 748 | BLP00705 hypothetical protein | | | |
| 749 | BLP00706 conserved hypothetical protein | Hypothetical protein [Bacillus licheniformis DSM 13] | UniRef100_Q65MX5 | Bacillus licheniformis DSM 13 |
| 750 | BLP00707 hypothetical protein | Winged helix DNA-binding [Bacillus licheniformis DSM 13] | UniRef100_Q62YB6 | Bacillus licheniformis DSM 13 |
| 751 | BLP00708 hypothetical protein | | | |
| 752 | yjeAA conserved hypothetical protein | Hypothetical protein yjeAA [Bacillus licheniformis DSM 13] | UniRef100_Q65MX2 | Bacillus licheniformis DSM 13 |
| 753 | yjeA Putative Carbohydrate Esterase Family 4 protein | YjeA [Bacillus licheniformis DSM 13] | UniRef100_Q65MX1 | Bacillus licheniformis DSM 13 |
| 754 | amyL alpha amylase, Glycoside Hydrolase Family 13 | Alpha-amylase precursor [Bacillus licheniformis] | UniRef100_P06278 | Bacillus licheniformis |
| 755 | yvdE probable transcriptional regulator YvdE | YvdE [Bacillus licheniformis DSM 13] | UniRef100_Q65MW9 | Bacillus licheniformis DSM 13 |
| 756 | yvdF Glycoside Hydrolase Family 13 YvdF | Maltogenic alpha-amylase [Bacillus licheniformis DSM 13] | UniRef100_Q65MW8 | Bacillus licheniformis DSM 13 |
| 757 | mdxE maltodextrin transport system substrate-binding | YvdG [Bacillus licheniformis DSM 13] | UniRef100_Q65MW7 | Bacillus licheniformis DSM 13 |
| | protein MdxE | | | |
| 758 | mdxF maltodextrin transport system permease protein | YvdH [Bacillus licheniformis DSM 13] | UniRef100_Q65MW6 | Bacillus licheniformis DSM 13 |
| | MdxF | | | |
| 759 | mdxG maltodextrin transport system permease | YvdI [Bacillus licheniformis DSM 13] | UniRef100_Q65MW5 | Bacillus licheniformis DSM 13 |
| | protein MdxG | | | |
| 760 | yvdJ conserved membrane protein YvdJ | Hypothetical protein yvdJ [Bacillus licheniformis DSM 13] | UniRef100_Q65MW4 | Bacillus licheniformis DSM 13 |
| 761 | yvdK Glycoside Hydrolase Family 65, YvdK | YvdK [Bacillus licheniformis DSM 13] | UniRef100_Q65MW3 | Bacillus licheniformis DSM 13 |
| 762 | malL Glycoside Hydrolase Family 13, MalL | MalL [Bacillus licheniformis DSM 13] | UniRef100_Q65MW2 | Bacillus licheniformis DSM 13 |
| 763 | pgcM beta-phosphoglucomutase and glucose-1- | PgcM [Bacillus licheniformis DSM 13] | UniRef100_Q65MW1 | Bacillus licheniformis DSM 13 |
| | phosphate phosphodismutase | | | |
| 764 | BLP00721 hypothetical protein | | | |
| 765 | tyrZ tyrosyl-tRNA synthetase | TyrZ [Bacillus licheniformis DSM 13] | UniRef100_Q65MW0 | Bacillus licheniformis DSM 13 |
| 766 | ywaE probable transcriptional regulator YwaE | YwaE [Bacillus licheniformis DSM 13] | UniRef100_Q65MV9 | Bacillus licheniformis DSM 13 |
| 767 | BLP00724 hypothetical protein | Hypothetical protein [Bacillus licheniformis DSM 13] | UniRef100_Q65MV8 | Bacillus licheniformis DSM 13 |
| 768 | BLP00725 hypothetical protein | Hypothetical protein [Bacillus licheniformis DSM 13] | UniRef100_Q65MV7 | Bacillus licheniformis DSM 13 |
| 769 | ydjM YdjM | Rare lipoprotein A [Bacillus licheniformis DSM 13] | UniRef100_Q62Y99 | Bacillus licheniformis DSM 13 |
| 770 | ydjN YdjN | YdjN [Bacillus licheniformis DSM 13] | UniRef100_Q65MV5 | Bacillus licheniformis DSM 13 |
| 771 | yeaA conserved protein YeaA | Hypothetical protein yeaA [Bacillus licheniformis DSM 13] | UniRef100_Q65MV4 | Bacillus licheniformis DSM 13 |
| 772 | BLP00730 Small nuclear-like ribonucleoprotein | Hypothetical protein [Bacillus licheniformis DSM 13] | UniRef100_Q65MV3 | Bacillus licheniformis DSM 13 |
| 773 | BLP00731 conserved hypothetical protein | Hypothetical protein [Bacillus licheniformis DSM 13] | UniRef100_Q65MV2 | Bacillus licheniformis DSM 13 |
| 774 | BLP00732 hypothetical protein | | | |
| 775 | sipS type I signal peptidase | SipS [Bacillus licheniformis DSM 13] | UniRef100_Q65MV1 | Bacillus licheniformis DSM 13 |
| 776 | BLP00734 putative methyltransferase | Hypothetical protein [Bacillus licheniformis DSM 13] | UniRef100_Q65MV0 | Bacillus licheniformis DSM 13 |
| 777 | BLP00735 hypothetical protein | | | |
| 778 | yhfK conserved protein YhfK | Hypothetical protein yhfK [Bacillus licheniformis DSM 13] | UniRef100_Q65MU9 | Bacillus licheniformis DSM 13 |
| 779 | ydeE probable transcriptional regulator YdeE | Hypothetical protein [Bacillus licheniformis DSM 13] | UniRef100_Q65MU8 | Bacillus licheniformis DSM 13 |
| 780 | cotA spore coat protein (outer) | CotA [Bacillus licheniformis DSM 13] | UniRef100_Q65MU7 | Bacillus licheniformis DSM 13 |
| 781 | BLP00739 Acyltransferase 3 | Hypothetical protein [Bacillus licheniformis DSM 13] | UniRef100_Q65MU6 | Bacillus licheniformis DSM 13 |
| 782 | BLP00740 hypothetical protein | Hypothetical protein [Bacillus licheniformis DSM 13] | UniRef100_Q65MU5 | Bacillus licheniformis DSM 13 |
| 783 | yeaB Cation efflux protein | YeaB [Bacillus licheniformis DSM 13] | UniRef100_Q65MU4 | Bacillus licheniformis DSM 13 |
| 784 | yeaC YeaC | YeaC [Bacillus licheniformis DSM 13] | UniRef100_Q65MU3 | Bacillus licheniformis DSM 13 |
| 785 | yeaD conserved protein YeaD | Hypothetical protein yeaD [Bacillus licheniformis DSM 13] | UniRef100_Q65MU2 | Bacillus licheniformis DSM 13 |
| 786 | yebA transglutaminase-like enzymes, putative | YebA [Bacillus licheniformis DSM 13] | UniRef100_Q65MU1 | Bacillus licheniformis DSM 13 |
| | cysteine protease YebA | | | |
| 787 | guaA GMP synthetase | GuaA [Bacillus licheniformis DSM 13] | UniRef100_Q65MU0 | Bacillus licheniformis DSM 13 |
| 788 | pbuG hypoxanthine_guanine permease | PbuG [Bacillus licheniformis DSM 13] | UniRef100_Q65MT9 | Bacillus licheniformis DSM 13 |
| 789 | BLP00747 hypothetical protein | | | |
| 790 | yebC YbeC | YebC [Bacillus licheniformis DSM 13] | UniRef100_Q65MT8 | Bacillus licheniformis DSM 13 |
| 791 | BLP00749 hypothetical protein | | | |
| 792 | yebE conserved membrane protein YebE | Hypothetical protein yebE [Bacillus licheniformis DSM 13] | UniRef100_Q65MT6 | Bacillus licheniformis DSM 13 |
| 793 | yebG conserved protein YebG | Hypothetical protein yebG [Bacillus licheniformis DSM 13] | UniRef100_Q65MT5 | Bacillus licheniformis DSM 13 |
| 794 | purE phosphoribosylaminoimidazole carboxylase I | PurE [Bacillus licheniformis DSM 13] | UniRef100_Q65MT4 | Bacillus licheniformis DSM 13 |
| 795 | purK phosphoribosylaminoimidazole carboxylase II | PurK [Bacillus licheniformis DSM 13] | UniRef100_Q65MT3 | Bacillus licheniformis DSM 13 |
| 796 | purB adenylosuccinate lyase | PurB [Bacillus licheniformis DSM 13] | UniRef100_Q65MT2 | Bacillus licheniformis DSM 13 |
| 797 | purC phosphoribosylaminoimidazole | PurC [Bacillus licheniformis DSM 13] | UniRef100_Q65MT1 | Bacillus licheniformis DSM 13 |
| | succinocarboxamide synthetase | | | |
| 798 | purS PurS | Hypothetical protein purS [Bacillus licheniformis DSM 13] | UniRef100_Q65MT0 | Bacillus licheniformis DSM 13 |
| 799 | purQ phosphoribosylformylglycinamidine synthetase I | PurQ [Bacillus licheniformis DSM 13] | UniRef100_Q65MS9 | Bacillus licheniformis DSM 13 |
| 800 | purL phosphoribosylformylglycinamidine synthetase II | PurL [Bacillus licheniformis DSM 13] | UniRef100_Q65MS8 | Bacillus licheniformis DSM 13 |
| 801 | purF glutamine phosphoribosylpyrophosphate | PurF [Bacillus licheniformis DSM 13] | UniRef100_Q65MS7 | Bacillus licheniformis DSM 13 |
| | amidotransferase | | | |
| 802 | purM phosphoribosylaminoimidazole synthetase | PurM [Bacillus licheniformis DSM 13] | UniRef100_Q65MS6 | Bacillus licheniformis DSM 13 |
| 803 | purN phosphoribosylglycinamide formyltransferase | PurN [Bacillus licheniformis DSM 13] | UniRef100_Q65MS5 | Bacillus licheniformis DSM 13 |
| 804 | purH phosphoribosylaminoimidazole carboxy formyl | PurH [Bacillus licheniformis DSM 13] | UniRef100_Q65MS4 | Bacillus licheniformis DSM 13 |
| | formyltransferase and inosine-monophosphate | | | |
| | cyclohydrolase | | | |
| 805 | purD phosphoribosylglycinamide synthetase | PurD [Bacillus licheniformis DSM 13] | UniRef100_Q65MS3 | Bacillus licheniformis DSM 13 |
| 806 | BLP00764 hypothetical protein | Homeodomain-like [Bacillus licheniformis DSM 13] | UniRef100_Q62Y67 | Bacillus licheniformis DSM 13 |
| 807 | yjiB Cytochrome P450 | YjiB [Bacillus licheniformis DSM 13] | UniRef100_Q65MS1 | Bacillus licheniformis DSM 13 |
| 808 | BLP04847 conserved hypothetical protein | Hypothetical protein [Bacillus licheniformis DSM 13] | UniRef100_Q62Y65 | Bacillus licheniformis DSM 13 |
| 809 | yybP YybP | YybP [Bacillus licheniformis DSM 13] | UniRef100_Q65MS0 | Bacillus licheniformis DSM 13 |
| 810 | BLP00767 hypothetical protein | Hypothetical protein [Bacillus licheniformis DSM 13] | UniRef100_Q65MR9 | Bacillus licheniformis DSM 13 |
| 811 | BLP00768 hypothetical protein | Hypothetical protein [Bacillus licheniformis DSM 13] | UniRef100_Q65MR8 | Bacillus licheniformis DSM 13 |
| 812 | yerA putative Metallo-dependent hydrolase | YerA [Bacillus licheniformis DSM 13] | UniRef100_Q65MR7 | Bacillus licheniformis DSM 13 |
| 813 | yerB conserved protein YerB | Hypothetical protein yerB [Bacillus licheniformis DSM 13] | UniRef100_Q65MR6 | Bacillus licheniformis DSM 13 |
| 814 | yerC conserved protein YerC | YerC [Bacillus licheniformis DSM 13] | UniRef100_Q65MR5 | Bacillus licheniformis DSM 13 |
| 815 | pcrB PcrB | PcrB [Bacillus licheniformis DSM 13] | UniRef100_Q65MR4 | Bacillus licheniformis DSM 13 |
| 816 | pcrA ATP-dependent DNA helicase | PcrA [Bacillus licheniformis DSM 13] | UniRef100_Q65MR3 | Bacillus licheniformis DSM 13 |
| 817 | ligA DNA ligase | LigA [Bacillus licheniformis DSM 13] | UniRef100_Q65MR2 | Bacillus licheniformis DSM 13 |
| 818 | yerH YerH | Hypothetical protein yerH [Bacillus licheniformis DSM 13] | UniRef100_Q65MR1 | Bacillus licheniformis DSM 13 |
| 819 | BLP00776 hypothetical protein | Hypothetical protein [Bacillus licheniformis DSM 13] | UniRef100_Q65MR0 | Bacillus licheniformis DSM 13 |
| 820 | BLP00777 hypothetical protein | Hypothetical protein [Bacillus licheniformis DSM 13] | UniRef100_Q65MQ9 | Bacillus licheniformis DSM 13 |
| 821 | BLP00778 hypothetical protein | Hypothetical protein [Bacillus licheniformis DSM 13] | UniRef100_Q65MQ8 | Bacillus licheniformis DSM 13 |
| 822 | BLP00779 hypothetical protein | Hypothetical protein [Bacillus licheniformis DSM 13] | UniRef100_Q65MQ7 | Bacillus licheniformis DSM 13 |
| 823 | BLP00780 zin-ion binding putative hydrolase | Hypothetical protein [Bacillus licheniformis DSM 13] | UniRef100_Q65MQ6 | Bacillus licheniformis DSM 13 |
| 824 | BLP00781 hypothetical protein | Hypothetical protein [Bacillus licheniformis DSM 13] | UniRef100_Q65MQ5 | Bacillus licheniformis DSM 13 |
| 825 | BLP00782 putative phosphopentomutase | Hypothetical protein [Bacillus licheniformis DSM 13] | UniRef100_Q65MQ4 | Bacillus licheniformis DSM 13 |
| 826 | BLP00783 putative alanine racemase | Hypothetical protein [Bacillus licheniformis DSM 13] | UniRef100_Q65MQ3 | Bacillus licheniformis DSM 13 |
| 827 | BLP04708 hypothetical protein | | | |
| 828 | nagB N-acetylglucosamine-6-phosphate isomerase | NagB [Bacillus licheniformis DSM 13] | UniRef100_Q65MQ2 | Bacillus licheniformis DSM 13 |
| 829 | BLP00785 hypothetical protein | | | |
| 830 | sapB SapB | Hypothetical protein sapB [Bacillus licheniformis DSM 13] | UniRef100_Q65MQ1 | Bacillus licheniformis DSM 13 |
| 831 | BLP00787 hypothetical protein | | | |
| 832 | opuE proline transporter | OpuE [Bacillus licheniformis DSM 13] | UniRef100_Q65MQ0 | Bacillus licheniformis DSM 13 |
| 833 | BLP00789 hypothetical protein | | | |
| 834 | gatC glutamyl-tRNA(Gln) amidotransferase (subunit | GatC (Glutamyl-tRNA(Gln) amidotransferase) [Bacillus | UniRef100_Q65MP9 | Bacillus licheniformis DSM 13 |
| | C) | licheniformis DSM 13] | | |
| 835 | gatA glutamyl-tRNA(Gln) amidotransferase (subunit | GatA (Glutamyl-tRNA(Gln) amidotransferase) [Bacillus | UniRef100_Q65MP8 | Bacillus licheniformis DSM 13 |
| | A) | licheniformis DSM 13] | | |
| 836 | gatB glutamyl-tRNA(Gln) amidotransferase (subunit | GatB [Bacillus licheniformis DSM 13] | UniRef100_Q65MP7 | Bacillus licheniformis DSM 13 |
| | B) | | | |
| 837 | BLP00793 conserved hypothetical protein | Hypothetical protein [Bacillus licheniformis DSM 13] | UniRef100_Q65MP6 | Bacillus licheniformis DSM 13 |
| 838 | BLP00794 hypothetical protein | Hypothetical protein [Bacillus licheniformis DSM 13] | UniRef100_Q65MP5 | Bacillus licheniformis DSM 13 |
| 839 | ydhT Glutamine amidotransferase, class-II | YdhT [Bacillus licheniformis DSM 13] | UniRef100_Q65MP4 | Bacillus licheniformis DSM 13 |
| 840 | yerO putative transcriptional regulator YerO | YerO [Bacillus licheniformis DSM 13] | UniRef100_Q65MP3 | Bacillus licheniformis DSM 13 |
| 841 | swrC swarming and motility protein SwrC | YerP [Bacillus licheniformis DSM 13] | UniRef100_Q65MP2 | Bacillus licheniformis DSM 13 |
| 842 | BLP00798 conserved hypothetical protein | Hypothetical protein [Bacillus licheniformis DSM 13] | UniRef100_Q65MP1 | Bacillus licheniformis DSM 13 |
| 843 | yjcK putative ribosomal-protein-alanine N- | YjcK [Bacillus licheniformis DSM 13] | UniRef100_Q65MP0 | Bacillus licheniformis DSM 13 |
| | acetyltransferase YjcK | | | |
| 844 | BLP00800 putative inosine-uridine preferring | Hypothetical protein [Bacillus licheniformis DSM 13] | UniRef100_Q65MN9 | Bacillus licheniformis DSM 13 |
| | nucleoside hydrolase | | | |
| 845 | yerQ putative kinase related to diacylglycerol kinase | Hypothetical protein yerQ [Bacillus licheniformis DSM 13] | UniRef100_Q65MN8 | Bacillus licheniformis DSM 13 |
| | YerQ | | | |
| 846 | yefA putative RNA methyltransferase YefA | YefA (TRNA (Uracil-5-)-methyltransferase/TrmA) [Bacillus | UniRef100_Q65MN7 | Bacillus licheniformis DSM 13 |
| | | licheniformis DSM 13] | | |
| 847 | BLP00803 hypothetical protein | Hypothetical protein [Bacillus cereus] | UniRef100_Q73EH0 | Bacillus cereus |
| 848 | BLP00805 HNH endonuclease domain protein | HNH endonuclease domain protein [Bacillus cereus] | UniRef100_Q73EG9 | Bacillus cereus |
| 849 | CDS_00859 hypothetical protein | S-adenosylmethionine synthetase [Bacillus cereus] | UniRef100_Q73EG7 | Bacillus cereus |
| 850 | BLP00806 putative S-adenosylmethinone synthetase | S-adenosylmethionine synthetase [Bacillus cereus] | UniRef100_Q73EG7 | Bacillus cereus |
| 851 | BLP00807 DNA methylase | DNA methylase, family protein [Bacillus cereus] | UniRef100_Q73EG6 | Bacillus cereus |
| 852 | BLP00808 cytosine methyltransferase | DNA-cytosine methyltransferase [Bacillus cereus] | UniRef100_Q73EG5 | Bacillus cereus |
| 853 | rapK response regulator aspartate phosphatase | RapK [Bacillus licheniformis DSM 13] | UniRef100_Q65MM8 | Bacillus licheniformis DSM 13 |
| 854 | phrK regulator of the activity of RapK phosphatase | Regulator of the activity of phosphatase RapK [Bacillus | UniRef100_Q62Y21 | Bacillus licheniformis DSM 13 |
| | | licheniformis DSM 13] | | |
| 855 | BLP04709 hypothetical protein | | | |
| 856 | BLP00811 putative SAM methytransferase | Hypothetical protein (Hypothetical SAM (And some other | UniRef100_Q65MM6 | Bacillus licheniformis DSM 13 |
| | | nucleotide) binding motif) [Bacillus licheniformis DSM 13] | | |
| 857 | BLP00812 hypothetical protein | | | |
| 858 | yeel hypothetical protein Yeel | Yeel [Bacillus licheniformis DSM 13] | UniRef100_Q65MM5 | Bacillus licheniformis DSM 13 |
| 859 | BLP00814 Putative HTH-type transcriptional regulator | Hypothetical protein [Bacillus licheniformis DSM 13] | UniRef100_Q65MM4 | Bacillus licheniformis DSM 13 |
| 860 | BLP00815 hypothetical protein | Hypothetical protein [Bacillus licheniformis DSM 13] | UniRef100_Q65MM3 | Bacillus licheniformis DSM 13 |
| 861 | yfmT Aldehyde dehydrogenase YfmT | YfmT [Bacillus licheniformis DSM 13] | UniRef100_Q65MM2 | Bacillus licheniformis DSM 13 |
| 862 | yfmS putative chemotaxis sensory transducer YfmS | YfmS [Bacillus licheniformis DSM 13] | UniRef100_Q65MM1 | Bacillus licheniformis DSM 13 |
| 863 | BLP00818 Sodium_sulphate symporter | Hypothetical protein [Bacillus licheniformis DSM 13] | UniRef100_Q65MM0 | Bacillus licheniformis DSM 13 |
| 864 | yfmR ABC transporter YfmR | YfmR [Bacillus licheniformis DSM 13] | UniRef100_Q65ML9 | Bacillus licheniformis DSM 13 |
| 865 | BLP00820 hypothetical protein | Hypothetical protein [Bacillus licheniformis DSM 13] | UniRef100_Q65ML8 | Bacillus licheniformis DSM 13 |
| 866 | yciA conserved hypothetical protein YciA | YciA [Bacillus licheniformis DSM 13] | UniRef100_Q65ML7 | Bacillus licheniformis DSM 13 |
| 867 | BLP00822 NAD-binding site protein | Hypothetical protein [Bacillus licheniformis DSM 13] | UniRef100_Q65ML6 | Bacillus licheniformis DSM 13 |
| 868 | BLP00823 GTP binding protein | Hypothetical protein [Bacillus licheniformis DSM 13] | UniRef100_Q65ML5 | Bacillus licheniformis DSM 13 |
| 869 | yciC Cobalamin synthesis protein_P47K | YciC [Bacillus licheniformis DSM 13] | UniRef100_Q65ML4 | Bacillus licheniformis DSM 13 |
| 870 | bioW 6-carboxyhexanoate-CoA ligase | BioW [Bacillus licheniformis DSM 13] | UniRef100_Q65ML3 | Bacillus licheniformis DSM 13 |
| 871 | bioA adenosylmethionine-8-amino-7-oxononanoate | BioA [Bacillus licheniformis DSM 13] | UniRef100_Q65ML2 | Bacillus licheniformis DSM 13 |
| | aminotransferase | | | |
| 872 | bioF 8-amino-7-oxononanoate synthase | BioF [Bacillus licheniformis DSM 13] | UniRef100_Q65ML1 | Bacillus licheniformis DSM 13 |
| 873 | bioD dethiobiotin synthetase | BioD [Bacillus licheniformis DSM 13] | UniRef100_Q65ML0 | Bacillus licheniformis DSM 13 |
| 874 | bioB biotin synthetase | BioB [Bacillus licheniformis DSM 13] | UniRef100_Q65MK9 | Bacillus licheniformis DSM 13 |
| 875 | bioI cytochrome P450 enzyme | BioI [Bacillus licheniformis DSM 13] | UniRef100_Q65MK8 | Bacillus licheniformis DSM 13 |
| 876 | BLP00831 cation transporter | Hypothetical protein (Hypothetical Cation (Not K+) channel, | UniRef100_Q65MK7 | Bacillus licheniformis DSM 13 |
| | | TM region, Cation channel, non-ligand gated) [Bacillus | | |
| | | licheniformis DSM 13] | | |
| 877 | ymfP Putative DNA binding protein YmfP | YfmP [Bacillus licheniformis DSM 13] | UniRef100_Q65MK6 | Bacillus licheniformis DSM 13 |
| 878 | yfmO putative multidrug efflux protein | YfmO [Bacillus licheniformis DSM 13] | UniRef100_Q65MK5 | Bacillus licheniformis DSM 13 |
| 879 | yfmM ABC transporter | YfmM [Bacillus licheniformis DSM 13] | UniRef100_Q65MK4 | Bacillus licheniformis DSM 13 |
| 880 | yfmL putative ATP binding helicase | YfmL [Bacillus licheniformis DSM 13] | UniRef100_Q65MK3 | Bacillus licheniformis DSM 13 |
| 881 | yfmJ putative oxidoreductase | YfmJ [Bacillus licheniformis DSM 13] | UniRef100_Q65MK2 | Bacillus licheniformis DSM 13 |
| 882 | BLP00837 hypothetical protein | YfmB [Bacillus licheniformis DSM 13] | UniRef100_Q65MK1 | Bacillus licheniformis DSM 13 |
| 883 | yflT conserved hypothetical protein YflT | YflT [Bacillus licheniformis DSM 13] | UniRef100_Q65MK0 | Bacillus licheniformis DSM 13 |
| 884 | yflS putative 2-oxoglutarate_malate translocator | YflS [Bacillus licheniformis DSM 13] | UniRef100_Q65MJ9 | Bacillus licheniformis DSM 13 |
| 885 | BLP00840 Putative Type IIc bacteriocin lichenein | | | |
| 886 | BLP00841 ABC transporter, ATPase subunit | ABC transporter ATP-binding protein [Clostridium tetani] | UniRef100_Q893J7 | Clostridium tetani |
| 887 | BLP00842 ABC transporter, permease subunit | ABC transporter-associated permease [Clostridium tetani] | UniRef100_Q899Z8 | Clostridium tetani |
| 888 | BLP00843 hypothetical protein | Hypothetical protein [Bacillus licheniformis DSM 13] | UniRef100_Q65MJ8 | Bacillus licheniformis DSM 13 |
| 889 | BLP00844 Beta-lactamase-like protein | Hypothetical protein [Bacillus licheniformis DSM 13] | UniRef100_Q65MJ7 | Bacillus licheniformis DSM 13 |
| 890 | yflN Beta-lactamase-like protein YflN | YflN [Bacillus licheniformis DSM 13] | UniRef100_Q65MJ6 | Bacillus licheniformis DSM 13 |
| 891 | BLP00846 putative carboxypeptidase | Hypothetical protein [Bacillus licheniformis DSM 13] | UniRef100_Q65MJ5 | Bacillus licheniformis DSM 13 |
| 892 | nos Nitric oxide synthase Nos | YflM [Bacillus licheniformis DSM 13] | UniRef100_Q65MJ4 | Bacillus licheniformis DSM 13 |
| 893 | sdpl conserved membrane protein Sdpl | Hypothetical protein yvaZ [Bacillus licheniformis DSM 13] | UniRef100_Q65MJ3 | Bacillus licheniformis DSM 13 |
| 894 | sdpR Transcriptional regulator SdpR | Winged helix DNA-binding [Bacillus licheniformis DSM 13] | UniRef100_Q62XY4 | Bacillus licheniformis DSM 13 |
| 895 | yflL Acylphosphatase YflL | YflL [Bacillus licheniformis DSM 13] | UniRef100_Q65MJ1 | Bacillus licheniformis DSM 13 |
| 896 | yflK conserved hypothetical protein with MOSC | YflK [Bacillus licheniformis DSM 13] | UniRef100_Q65MJ0 | Bacillus licheniformis DSM 13 |
| | domain YflK | | | |
| 897 | yflJ hypothetical protein | YflJ [Bacillus licheniformis DSM 13] | UniRef100_Q65MI9 | Bacillus licheniformis DSM 13 |
| 898 | yflI conserved hypothetical protein YflI | YflI [Bacillus licheniformis DSM 13] | UniRef100_Q65MI8 | Bacillus licheniformis DSM 13 |
| 899 | yflG Peptidase M24A, methionine aminopeptidase, | YflG [Bacillus licheniformis DSM 13] | UniRef100_Q65MI7 | Bacillus licheniformis DSM 13 |
| | subfamily 1 | | | |
| 900 | yflE Sulfatase YflE | YflE [Bacillus licheniformis DSM 13] | UniRef100_Q65MI6 | Bacillus licheniformis DSM 13 |
| 901 | BLP00856 hypothetical protein | | | |
| 902 | yflB conserved hypothetical protein YflB | YflB [Bacillus licheniformis DSM 13] | UniRef100_Q65MI5 | Bacillus licheniformis DSM 13 |
| 903 | yflA Sodium:alanine symporter YflA | YflA [Bacillus licheniformis DSM 13] | UniRef100_Q65MI4 | Bacillus licheniformis DSM 13 |
| 904 | treP phosphotransferase system (PTS) trehalose- | TreP (Phosphotransferase system (PTS) trehalose-specific | UniRef100_Q65MI3 | Bacillus licheniformis DSM 13 |
| | specific enzyme IIBC component | enzyme IIBC component) [Bacillus licheniformis DSM 13] | | |
| 905 | treA Glycoside Hydrolase Family 13 | TreA [Bacillus licheniformis DSM 13] | UniRef100_Q65MI2 | Bacillus licheniformis DSM 13 |
| 906 | treR transcriptional regulator (GntR family) | TreR [Bacillus licheniformis DSM 13] | UniRef100_Q65MI1 | Bacillus licheniformis DSM 13 |
| 907 | BLP00862 putative transferase hexapeptide repeat | Hypothetical protein [Bacillus licheniformis DSM 13] | UniRef100_Q65MI0 | Bacillus licheniformis DSM 13 |
| | containing protein | | | |
| 908 | BLP00863 hypothetical protein | Hypothetical protein [Bacillus licheniformis DSM 13] | UniRef100_Q65MH9 | Bacillus licheniformis DSM 13 |
| 909 | BLP00864 hypothetical protein | | | |
| 910 | BLP00865 Hypothetical protein | Hypothetical protein [Bacillus licheniformis DSM 13] | UniRef100_Q65MH9 | Bacillus licheniformis DSM 13 |
| 911 | BLP00866 Hypothetical protein | Hypothetical protein [Bacillus licheniformis DSM 13] | UniRef100_Q65MH8 | Bacillus licheniformis DSM 13 |
| 912 | spsC spore coat biosynthesis protein | Hypothetical protein spsCA [Bacillus licheniformis DSM 13] | UniRef100_Q65MH7 | Bacillus licheniformis DSM 13 |
| 913 | BLP00868 putative transferase hexapeptide repeat | Hypothetical protein [Bacillus licheniformis DSM 13] | UniRef100_Q65MH6 | Bacillus licheniformis DSM 13 |
| | containing protein | | | |
| 914 | BLP00869 NAD-dependent epimerase_dehydratase | YtcB [Bacillus licheniformis DSM 13] | UniRef100_Q65MH5 | Bacillus licheniformis DSM 13 |
| 915 | BLP00870 putative transferase, conserved | Hypothetical protein [Bacillus licheniformis DSM 13] | UniRef100_Q65MH4 | Bacillus licheniformis DSM 13 |
| | hypothetical protein | | | |
| 916 | BLP00871 putative glycosyl transferase family 2_4 | Hypothetical protein [Bacillus licheniformis DSM 13] | UniRef100_Q65MH3 | Bacillus licheniformis DSM 13 |
| | protein | | | |
| 917 | BLP00872 TPR-like, putative glycosyl transferase | Hypothetical protein [Bacillus licheniformis DSM 13] | UniRef100_Q65MH2 | Bacillus licheniformis DSM 13 |
| | family 2 protein | | | |
| 918 | spsC spore coat biosynthesis protein | SpsC [Bacillus licheniformis DSM 13] | UniRef100_Q65MH1 | Bacillus licheniformis DSM 13 |
| 919 | BLP00874 putative Oxidoreductase | YrbE [Bacillus licheniformis DSM 13] | UniRef100_Q65MH0 | Bacillus licheniformis DSM 13 |
| 920 | BLP00875 UDP-glucose 6-dehydrogenase | YtcA [Bacillus licheniformis DSM 13] | UniRef100_Q65MG9 | Bacillus licheniformis DSM 13 |
| 921 | BLP00876 conserved hypothetical protein | Hypothetical protein [Bacillus licheniformis DSM 13] | UniRef100_Q65MG8 | Bacillus licheniformis DSM 13 |
| 922 | ydeP conserved hypothetical DNA binding protein | YdeP [Bacillus licheniformis DSM 13] | UniRef100_Q65MG7 | Bacillus licheniformis DSM 13 |
| | YdeP | | | |
| 923 | nfsB NADH-dependent nitro_flavin oxidoreductase | YfkO [Bacillus licheniformis DSM 13] | UniRef100_Q65MG6 | Bacillus licheniformis DSM 13 |
| 924 | yfkN putative nucleotidase YfkN | YfkN [Bacillus licheniformis DSM 13] | UniRef100_Q65MG5 | Bacillus licheniformis DSM 13 |
| 925 | yfkM general stress protein YfkM | YfkM [Bacillus licheniformis DSM 13] | UniRef100_Q65MG4 | Bacillus licheniformis DSM 13 |
| 926 | yfkK conserved protein YfkK | Hypothetical protein ytkK [Bacillus licheniformis DSM 13] | UniRef100_Q65MG3 | Bacillus licheniformis DSM 13 |
| 927 | BLP00882 putative Sodium:aminoacid symporter | Hypothetical protein [Bacillus licheniformis DSM 13] | UniRef100_Q65MG2 | Bacillus licheniformis DSM 13 |
| 928 | yfkJ protein-tyrosine phosphatase YfkJ | Low molecular weight phosphotyrosine protein phosphatase | UniRef100_Q62XV3 | Bacillus licheniformis DSM 13 |
| | | [Bacillus licheniformis DSM 13] | | |
| 929 | yfkI YfkI | Hypothetical protein yfkI [Bacillus licheniformis DSM 13] | UniRef100_Q65MG0 | Bacillus licheniformis DSM 13 |
| 930 | yfkH Possible RNase YfkH | YfkH [Bacillus licheniformis DSM 13] | UniRef100_Q65MF9 | Bacillus licheniformis DSM 13 |
| 931 | yfkF putative transcriptional regulator YfkF | YfkF [Bacillus licheniformis DSM 13] | UniRef100_Q65MF8 | Bacillus licheniformis DSM 13 |
| 932 | BLP00887 putative stress response protein | Hypothetical protein [Bacillus licheniformis DSM 13] | UniRef100_Q65MF7 | Bacillus licheniformis DSM 13 |
| 933 | yfkE H_Ca2 exchanger YfkE | YfkE [Bacillus licheniformis DSM 13] | UniRef100_Q65MF6 | Bacillus licheniformis DSM 13 |
| 934 | yfkD conserved protein YfkD | Hypothetical protein yfkD [Bacillus licheniformis DSM 13] | UniRef100_Q65MF5 | Bacillus licheniformis DSM 13 |
| 935 | yfkA conserved protein YfkA | Hypothetical protein [Bacillus licheniformis DSM 13] | UniRef100_Q65MF4 | Bacillus licheniformis DSM 13 |
| 936 | yfjT conserved protein YfjT | Hypothetical protein yrjT [Bacillus licheniformis DSM 13] | UniRef100_Q65MF3 | Bacillus licheniformis DSM 13 |
| 937 | yfjS putative Carbohydrate Esterase Family 4 YfjS | YfjS [Bacillus licheniformis DSM 13] | UniRef100_Q65MF2 | Bacillus licheniformis DSM 13 |
| 938 | BLP00893 putative iron-binding oxidoreductase | Hypothetical protein [Bacillus licheniformis DSM 13] | UniRef100_Q65MF1 | Bacillus licheniformis DSM 13 |
| 939 | BLP00894 hypothetical protein | Hypothetical protein [Bacillus licheniformis DSM 13] | UniRef100_Q65MF0 | Bacillus licheniformis DSM 13 |
| 940 | corA Magnesium and cobalt transport protein CorA | YfjQ [Bacillus licheniformis DSM 13] | UniRef100_Q65ME9 | Bacillus licheniformis DSM 13 |
| 941 | yfjP putative DNA glycosylase | YfjP [Bacillus licheniformis DSM 13] | UniRef100_Q65ME8 | Bacillus licheniformis DSM 13 |
| 942 | yfjO tRNA (uracil-5-)-methyltransferase | YfjO [Bacillus licheniformis DSM 13] | UniRef100_Q65ME7 | Bacillus licheniformis DSM 13 |
| 943 | yfjM conserved protein YfjM | YfjM [Bacillus licheniformis DSM 13] | UniRef100_Q65ME6 | Bacillus licheniformis DSM 13 |
| 944 | BLP00900 conserved hypothetical protein | Hypothetical protein [Bacillus licheniformis DSM 13] | UniRef100_Q65ME5 | Bacillus licheniformis DSM 13 |
| 945 | BLP00901 hypothetical protein | Hypothetical protein [Bacillus licheniformis DSM 13] | UniRef100_Q65ME4 | Bacillus licheniformis DSM 13 |
| 946 | yfjL putative transporter YfjL | Hypothetical protein [Bacillus licheniformis DSM 13] | UniRef100_Q65ME3 | Bacillus licheniformis DSM 13 |
| 947 | yvkB probable transcriptional regulator | YvkB [Bacillus licheniformis DSM 13] | UniRef100_Q65ME2 | Bacillus licheniformis DSM 13 |
| 948 | ydhE UDP-glycosyltransferase, Glycosyl Transferase | YdhE [Bacillus licheniformis DSM 13] | UniRef100_Q65ME1 | Bacillus licheniformis DSM 13 |
| | Family 1, YdhE | | | |
| 949 | BLP00905 hypothetical protein | YckD [Bacillus licheniformis DSM 13] | UniRef100_Q65ME0 | Bacillus licheniformis DSM 13 |
| 950 | yceI Sugar transporter superfamily YceI | YceI [Bacillus licheniformis DSM 13] | UniRef100_Q65MD9 | Bacillus licheniformis DSM 13 |
| 951 | sacX negative regulatory protein of SacY | SacX [Bacillus licheniformis DSM 13] | UniRef100_Q65MD8 | Bacillus licheniformis DSM 13 |
| 952 | sacY transcriptional antiterminator | SacY [Bacillus licheniformis DSM 13] | UniRef100_Q65MD7 | Bacillus licheniformis DSM 13 |
| 953 | ybcF Carbonic anhydrase YbcF | YbcF [Bacillus licheniformis DSM 13] | UniRef100_Q65MD6 | Bacillus licheniformis DSM 13 |
| 954 | ybcD conserved hypothetical protein YbcD | YbcD [Bacillus licheniformis DSM 13] | UniRef100_Q65MD5 | Bacillus licheniformis DSM 13 |
| 955 | ndhF NADH dehydrogenase (subunit 5) | NdhF [Bacillus licheniformis DSM 13] | UniRef100_Q65MD4 | Bacillus licheniformis DSM 13 |
| 956 | ybcI conserved protein YbcI | YbcI [Bacillus licheniformis DSM 13] | UniRef100_Q65MD3 | Bacillus licheniformis DSM 13 |
| 957 | BLP00913 hypothetical protein | | | |
| 958 | BLP00914 putative intracellular protease | Hypothetical protein [Bacillus licheniformis DSM 13] | UniRef100_Q65MD2 | Bacillus licheniformis DSM 13 |
| 959 | acoA acetoin dehydrogenase E1 component (TPP- | AcoA [Bacillus licheniformis DSM 13] | UniRef100_Q65MD1 | Bacillus licheniformis DSM 13 |
| | dependent alpha subunit) | | | |
| 960 | acoB acetoin dehydrogenase E1 component (TPP- | AcoB [Bacillus licheniformis DSM 13] | UniRef100_Q65MD0 | Bacillus licheniformis DSM 13 |
| | dependent beta subunit) | | | |
| 961 | acoC acetoin dehydrogenase E2 component | AcoC [Bacillus licheniformis DSM 13] | UniRef100_Q65MC9 | Bacillus licheniformis DSM 13 |
| | (dihydrolipoamide acetyltransferase) | | | |
| 962 | acoL acetoin dehydrogenase E3 component | AcoL [Bacillus licheniformis DSM 13] | UniRef100_Q65MC8 | Bacillus licheniformis DSM 13 |
| | (dihydrolipoamide dehydrogenase) | | | |
| 963 | acoR transcriptional regulator | AcoR [Bacillus licheniformis DSM 13] | UniRef100_Q65MC7 | Bacillus licheniformis DSM 13 |
| 964 | yfjF conserved membrane protein YfjF | Hypothetical protein yfjF [Bacillus licheniformis DSM 13] | UniRef100_Q62XR9 | Bacillus licheniformis DSM 13 |
| 965 | glvA Glycoside Hydrolase, Family 4, GlvA | MalA [Bacillus licheniformis DSM 13] | UniRef100_Q65MC5 | Bacillus licheniformis DSM 13 |
| 966 | glvR ATP-dependent helicase, DEAD-box | YfiA [Bacillus licheniformis DSM 13] | UniRef100_Q65MC4 | Bacillus licheniformis DSM 13 |
| 967 | malP phosphotransferase system (PTS) maltose- | Phosphotransferase system (PTS) maltose-specific enzyme | UniRef100_Q62XR6 | Bacillus licheniformis DSM 13 |
| | specific enzyme IICB component | IICB component [Bacillus licheniformis DSM 13] | | |
| 968 | BLP00924 putative SAM methyltransferase | Hypothetical protein (Hypothetical SAM (And some other | UniRef100_Q65MC2 | Bacillus licheniformis DSM 13 |
| | | nucleotide) binding motif) [Bacillus licheniformis DSM 13] | | |
| 969 | BLP00925 hypothetical protein | Hypothetical protein [Bacillus licheniformis DSM 13] | UniRef100_Q65MC1 | Bacillus licheniformis DSM 13 |
| 970 | yvaP possible transcriptional regulator YvaP | YodB [Bacillus licheniformis DSM 13] | UniRef100_Q65MC0 | Bacillus licheniformis DSM 13 |
| 971 | yfiD conserved membrane protein YfiD | YfiD [Bacillus licheniformis DSM 13] | UniRef100_Q65MB9 | Bacillus licheniformis DSM 13 |
| 972 | yfiE Glyoxalase I YfiE | YfiE [Bacillus licheniformis DSM 13] | UniRef100_Q65MB8 | Bacillus licheniformis DSM 13 |
| 973 | xynBA Glycoside Hydrolase Family 43 | Hypothetical protein [Bacillus licheniformis DSM 13] | UniRef100_Q65MB7 | Bacillus licheniformis DSM 13 |
| 974 | xynBB Glycoside Hydrolase Family 43 | XynB [Bacillus licheniformis DSM 13] | UniRef100_Q65MB6 | Bacillus licheniformis DSM 13 |
| 975 | yfiF probable transcriptional regulator YfiF | YfiF [Bacillus licheniformis DSM 13] | UniRef100_Q65MB5 | Bacillus licheniformis DSM 13 |
| 976 | BLP00932 putative extracellular solute-binding | Hypothetical protein [Bacillus licheniformis DSM 13] | UniRef100_Q65MB4 | Bacillus licheniformis DSM 13 |
| | protein, family 1 | | | |
| 977 | BLP00933 hypothetical protein | | | |
| 978 | ydeQ NAD(P)H dehydrogenase (quinone) | YdeQ (NAD(P)H dehydrogenase) [Bacillus licheniformis DSM | UniRef100_Q65MB3 | Bacillus licheniformis DSM 13 |
| | | 13] | | |
| 979 | yjhB hypothetical protein, putative hydrolase | YjhB [Bacillus licheniformis DSM 13] | UniRef100_Q65MB2 | Bacillus licheniformis DSM 13 |
| 980 | BLP00936 hypothetical protein | Hypothetical protein yfiT [Bacillus licheniformis DSM 13] | UniRef100_Q65MB1 | Bacillus licheniformis DSM 13 |
| 981 | yfiX conserved membrane protein YfiX | Hypothetical protein yfiX [Bacillus licheniformis DSM 13] | UniRef100_Q65MA9 | Bacillus licheniformis DSM 13 |
| 982 | BLP00938 hypothetical protein | | | |
| 983 | yfhB Phenazine biosynthesis-like protein | YfhB [Bacillus licheniformis DSM 13] | UniRef100_Q65MA8 | Bacillus licheniformis DSM 13 |
| 984 | yfhC Nitroreductase | Hypothetical protein [Bacillus licheniformis DSM 13] | UniRef100_Q65MA7 | Bacillus licheniformis DSM 13 |
| 985 | yfhD conserved hypothetical YfhD | Hypothetical protein yfhD [Bacillus licheniformis DSM 13] | UniRef100_Q65MA6 | Bacillus licheniformis DSM 13 |
| 986 | BLP00942 hypothetical protein | Hypothetical protein [Bacillus licheniformis DSM 13] | UniRef100_Q62XP8 | Bacillus licheniformis DSM 13 |
| 987 | BLP00943 putative acetyl transferase | Hypothetical protein [Bacillus licheniformis DSM 13] | UniRef100_Q65MA5 | Bacillus licheniformis DSM 13 |
| 988 | yfhF Conserved hypothetical protein, YfcH | YfhF [Bacillus licheniformis DSM 13] | UniRef100_Q65MA4 | Bacillus licheniformis DSM 13 |
| 989 | recX conserved protein RecX | YfhG [Bacillus licheniformis DSM 13] | UniRef100_Q65MA3 | Bacillus licheniformis DSM 13 |
| 990 | yfhH conserved protein YfhH | Hypothetical protein yfhH [Bacillus licheniformis DSM 13] | UniRef100_Q65MA2 | Bacillus licheniformis DSM 13 |
| 991 | BLP00947 hypothetical protein | | | |
| 992 | sspK small acid-soluble spore protein | SspK [Bacillus licheniformis DSM 13] | UniRef100_Q65MA1 | Bacillus licheniformis DSM 13 |
| 993 | yfhJ conserved protein YfhJ | Hypothetical protein yfhJ [Bacillus licheniformis DSM 13] | UniRef100_Q65MA0 | Bacillus licheniformis DSM 13 |
| 994 | BLP00950 hypothetical protein | | | |
| 995 | csbB stress response protein, Glycosyl Transferase | CsbB [Bacillus licheniformis DSM 13] | UniRef100_Q65M99 | Bacillus licheniformis DSM 13 |
| | Family 2 | | | |
| 996 | BLP00952 putative transporter | Hypothetical protein [Bacillus licheniformis DSM 13] | UniRef100_Q65M98 | Bacillus licheniformis DSM 13 |
| 997 | yfhO conserved membrane protein YfhO | Hypothetical protein yfhO [Bacillus licheniformis DSM 13] | UniRef100_Q65M97 | Bacillus licheniformis DSM 13 |
| 998 | yfhP Predicted membrane-bound metal-dependent | YfhP [Bacillus licheniformis DSM 13] | UniRef100_Q65M96 | Bacillus licheniformis DSM 13 |
| | hydrolase | | | |
| 999 | yfhQ putative A_G-specific adenine glycosylase YfhQ | YfhQ [Bacillus licheniformis DSM 13] | UniRef100_Q65M95 | Bacillus licheniformis DSM 13 |
| 1000 | yfhS conserved protein YhfS | Hypothetical protein yfhS [Bacillus licheniformis DSM 13] | UniRef100_Q65M94 | Bacillus licheniformis DSM 13 |
| 1001 | fabL enoyl-acyl carrier protein reductase | FabL [Bacillus licheniformis DSM 13] | UniRef100_Q65M93 | Bacillus licheniformis DSM 13 |
| 1002 | sspE small acid-soluble spore protein (gamma-type | Hypothetical protein [Bacillus licheniformis DSM 13] | UniRef100_Q65M92 | Bacillus licheniformis DSM 13 |
| | SASP) | | | |
| 1003 | ygaB conserved hypothetical protein YgaB | YgaB [Bacillus licheniformis DSM 13] | UniRef100_Q65M91 | Bacillus licheniformis DSM 13 |
| 1004 | ygaC conserved hypothetical protein YgaC | YgaC [Bacillus licheniformis DSM 13] | UniRef100_Q65M90 | Bacillus licheniformis DSM 13 |
| 1005 | ygaD ABC transporter YgaD | YgaD [Bacillus licheniformis DSM 13] | UniRef100_Q65M89 | Bacillus licheniformis DSM 13 |
| 1006 | appDC oligopeptide ABC transporter (ATP-binding | Hypothetical protein [Bacillus licheniformis DSM 13] | UniRef100_Q65M88 | Bacillus licheniformis DSM 13 |
| | protein) | | | |
| 1007 | appFC oligopeptide ABC transporter (ATP-binding | Hypothetical protein [Bacillus licheniformis DSM 13] | UniRef100_Q65M87 | Bacillus licheniformis DSM 13 |
| | protein) | | | |
| 1008 | appAC oligopeptide ABC transporter (binding protein) | Hypothetical protein [Bacillus licheniformis DSM 13] | UniRef100_Q65M86 | Bacillus licheniformis DSM 13 |
| 1009 | appBC oligopeptide ABC transporter (permease) | Hypothetical protein [Bacillus licheniformis DSM 13] | UniRef100_Q65M85 | Bacillus licheniformis DSM 13 |
| 1010 | appCC oligopeptide ABC transporter (permease) | Hypothetical protein [Bacillus licheniformis DSM 13] | UniRef100_Q65M84 | Bacillus licheniformis DSM 13 |
| 1011 | ygaE conserved hypothetical protein YgaE | YgaE [Bacillus licheniformis DSM 13] | UniRef100_Q65M83 | Bacillus licheniformis DSM 13 |
| 1012 | gsaB glutamate-1-semialdehyde aminotransferase | GsaB [Bacillus licheniformis DSM 13] | UniRef100_Q65M82 | Bacillus licheniformis DSM 13 |
| 1013 | ygaF YgaF | YgaF [Bacillus licheniformis DSM 13] | UniRef100_Q65M81 | Bacillus licheniformis DSM 13 |
| 1014 | perR transcriptional regulator (Fur family) | PerR [Bacillus licheniformis DSM 13] | UniRef100_Q65M80 | Bacillus licheniformis DSM 13 |
| 1015 | BLP00970 hypothetical protein | | | |
| 1016 | ygzB conserved hypothetical protein ygzB | YgzB [Bacillus licheniformis DSM 13] | UniRef100_Q65M79 | Bacillus licheniformis DSM 13 |
| 1017 | ygxA conserved protein YgxA | Hypothetical protein ygxA [Bacillus licheniformis DSM 13] | UniRef100_Q65M78 | Bacillus licheniformis DSM 13 |
| 1018 | BLP00973 hypothetical protein | | | |
| 1019 | BLP00974 response regulator aspartate phosphatase | Hypothetical protein [Bacillus licheniformis DSM 13] | UniRef100_Q65M77 | Bacillus licheniformis DSM 13 |
| 1020 | BLP00975 hypothetical protein | Hypothetical protein [Bacillus licheniformis DSM 13] | UniRef100_Q65M75 | Bacillus licheniformis DSM 13 |
| 1021 | BLP00976 hypothetical protein | Hypothetical protein [Bacillus licheniformis DSM 13] | UniRef100_Q62XL7 | Bacillus licheniformis DSM 13 |
| 1022 | BLP00977 conserved hypothetical protein | Hypothetical protein [Bacillus licheniformis DSM 13] | UniRef100_Q65M74 | Bacillus licheniformis DSM 13 |
| 1023 | BLP00978 conserved hyopothetical phagelike protein | Hypothetical protein [Bacillus licheniformis DSM 13] | UniRef100_Q62XL6 | Bacillus licheniformis DSM 13 |
| 1024 | BLP00979 hypothetical phage-like protein | Hypothetical protein [Bacillus licheniformis DSM 13] | UniRef100_Q62XL5 | Bacillus licheniformis DSM 13 |
| 1025 | BLP00980 N-acetylmuramoyl-L-alanine amidase | Hypothetical protein [Bacillus licheniformis DSM 13] | UniRef100_Q65M73 | Bacillus licheniformis DSM 13 |
| 1026 | BLP04848 conserved hypothetical protein | Hypothetical protein [Bacillus licheniformis DSM 13] | UniRef100_Q65M72 | Bacillus licheniformis DSM 13 |
| 1027 | BLP00981 transposase protein | Hypothetical protein [Bacillus licheniformis DSM 13] | UniRef100_Q65M71 | Bacillus licheniformis DSM 13 |
| 1028 | BLP04849 conserved hypothetical protein | Hypothetical protein [Bacillus licheniformis DSM 13] | UniRef100_Q62XL1 | Bacillus licheniformis DSM 13 |
| 1029 | BLP00982 hypothetical protein | Hypothetical protein [Bacillus licheniformis DSM 13] | UniRef100_Q65M70 | Bacillus licheniformis DSM 13 |
| 1030 | BLP00983 putative transposase | Hypothetical protein [Bacillus licheniformis DSM 13] | UniRef100_Q65M71 | Bacillus licheniformis DSM 13 |
| 1031 | rapE response regulator aspartate phosphatase | RapE [Bacillus licheniformis DSM 13] | UniRef100_Q65M68 | Bacillus licheniformis DSM 13 |
| 1032 | BLP00985 hypothetical protein | | | |
| 1033 | thrSA threonyl-tRNA synthetase | Hypothetical protein [Bacillus licheniformis DSM 13] | UniRef100_Q65M67 | Bacillus licheniformis DSM 13 |
| 1034 | BLP00987 hypothetical protein | BH3865 protein [Bacillus halodurans] | UniRef100_Q9K667 | Bacillus halodurans |
| 1035 | aroC 3-dehydroquinate dehydratase | AroC [Bacillus licheniformis DSM 13] | UniRef100_Q65M66 | Bacillus licheniformis DSM 13 |
| 1036 | thiC ThiC | ThiC [Bacillus licheniformis DSM 13] | UniRef100_Q65M65 | Bacillus licheniformis DSM 13 |
| 1037 | BLP00990 hypothetical protein | | | |
| 1038 | ssuB aliphatic sulfonate ABC transporter (binding | SsuB [Bacillus licheniformis DSM 13] | UniRef100_Q65M64 | Bacillus licheniformis DSM 13 |
| | protein) | | | |
| 1039 | ssuA aliphatic sulfonate ABC transporter (binding | SsuA [Bacillus licheniformis DSM 13] | UniRef100_Q65M63 | Bacillus licheniformis DSM 13 |
| | lipoprotein) | | | |
| 1040 | ssuC aliphatic sulfonate ABC transporter (permease) | SsuC [Bacillus licheniformis DSM 13] | UniRef100_Q65M62 | Bacillus licheniformis DSM 13 |
| 1041 | ssuD aliphatic sulfonate monooxygenase | SsuD [Bacillus licheniformis DSM 13] | UniRef100_Q65M61 | Bacillus licheniformis DSM 13 |
| 1042 | ygaO conserved hypothetical protein YgaO | YgaO [Bacillus licheniformis DSM 13] | UniRef100_Q65M60 | Bacillus licheniformis DSM 13 |
| 1043 | yazB putative DNA binding protein YazB | YazB [Bacillus licheniformis DSM 13] | UniRef100_Q65M59 | Bacillus licheniformis DSM 13 |
| 1044 | BLP00997 conserved hypothetical protein | Hypothetical protein [Bacillus licheniformis DSM 13] | UniRef100_Q65M58 | Bacillus licheniformis DSM 13 |
| 1045 | BLP00998 ABC transporter | Hypothetical protein [Bacillus licheniformis DSM 13] | UniRef100_Q65M57 | Bacillus licheniformis DSM 13 |
| 1046 | BLP00999 hypothetical protein | Hypothetical protein [Bacillus licheniformis DSM 13] | UniRef100_Q65M56 | Bacillus licheniformis DSM 13 |
| 1047 | BLP01000 putative metallopeptidase | Hypothetical protein [Bacillus licheniformis DSM 13] | UniRef100_Q65M55 | Bacillus licheniformis DSM 13 |
| 1048 | BLP01001 hypothetical protein with conserved | Hypothetical protein [Bacillus licheniformis DSM 13] | UniRef100_Q65M54 | Bacillus licheniformis DSM 13 |
| | domain | | | |
| 1049 | rpsNB 30S ribosomal protein S14-2 | YhzA [Bacillus licheniformis DSM 13] | UniRef100_Q65M53 | Bacillus licheniformis DSM 13 |
| 1050 | BLP01003 conserved hypothetical protein | YhzB [Bacillus licheniformis DSM 13] | UniRef100_Q65M52 | Bacillus licheniformis DSM 13 |
| 1051 | yhbA 4Fe-4S cluster binding putative ferredoxin | YhbA [Bacillus licheniformis DSM 13] | UniRef100_Q65M51 | Bacillus licheniformis DSM 13 |
| 1052 | yhbB conserved hypothetical protein yhbB | YhbB [Bacillus licheniformis DSM 13] | UniRef100_Q65M50 | Bacillus licheniformis DSM 13 |
| 1053 | cspR rRNA methylase homolog | CspR [Bacillus licheniformis DSM 13] | UniRef100_Q65M49 | Bacillus licheniformis DSM 13 |
| 1054 | yhbD Putative DNA binding protein YhbD | Putative DNA binding [Bacillus licheniformis DSM 13] | UniRef100_Q62X16 | Bacillus licheniformis DSM 13 |
| 1055 | yhbE putative cytosolic protein YhbE | YhbE [Bacillus licheniformis DSM 13] | UniRef100_Q65M47 | Bacillus licheniformis DSM 13 |
| 1056 | yhbF conserved hypothetical protein YhbF | YhbF [Bacillus licheniformis DSM 13] | UniRef100_Q65M46 | Bacillus licheniformis DSM 13 |
| 1057 | BLP01010 hypothetical protein | Hypothetical protein [Bacillus licheniformis DSM 13] | UniRef100_Q65M45 | Bacillus licheniformis DSM 13 |
| 1058 | BLP01011 hypothetical protein | | | |
| 1059 | prkA serine protein kinase | PrkA [Bacillus licheniformis DSM 13] | UniRef100_Q65M44 | Bacillus licheniformis DSM 13 |
| 1060 | yhbH putative stress response protein YhbH | YhbH [Bacillus licheniformis DSM 13] | UniRef100_Q65M43 | Bacillus licheniformis DSM 13 |
| 1061 | yhbJ putative transporter YhbJ | YhbJ [Bacillus licheniformis DSM 13] | UniRef100_Q65M42 | Bacillus licheniformis DSM 13 |
| 1062 | yhcA Drug resistance transporter YhcA | YhcA [Bacillus licheniformis DSM 13] | UniRef100_Q65M41 | Bacillus licheniformis DSM 13 |
| 1063 | yhcB putative Flavodoxin_nitric oxide synthase YhcB | YhcB [Bacillus licheniformis DSM 13] | UniRef100_Q65M40 | Bacillus licheniformis DSM 13 |
| 1064 | yhcC conserved hypothetical protein YhcC | Hypothetical protein [Bacillus licheniformis DSM 13] | UniRef100_Q65M39 | Bacillus licheniformis DSM 13 |
| 1065 | yhcG ABC transporter YhcG | Hypothetical protein [Bacillus licheniformis DSM 13] | UniRef100_Q62XH6 | Bacillus licheniformis DSM 13 |
| 1066 | yhcH ABC transporter YhcH | YhcH [Bacillus licheniformis DSM 13] | UniRef100_Q65M37 | Bacillus licheniformis DSM 13 |
| 1067 | yhcI putative permease YhcI | YhcI [Bacillus licheniformis DSM 13] | UniRef100_Q65M36 | Bacillus licheniformis DSM 13 |
| 1068 | cspB major cold-shock protein | CspB [Bacillus licheniformis DSM 13] | UniRef100_Q65M35 | Bacillus licheniformis DSM 13 |
| 1069 | BLP01023 ABC transporter | Hypothetical protein [Bacillus licheniformis DSM 13] | UniRef100_Q65M34 | Bacillus licheniformis DSM 13 |
| 1070 | BLP01024 Binding-protein-dependent transport | Hypothetical protein [Bacillus licheniformis DSM 13] | UniRef100_Q65M33 | Bacillus licheniformis DSM 13 |
| | systems inner membrane component | | | |
| 1071 | yhcJ ABC transport system protein YhcJ | YhcJ [Bacillus licheniformis DSM 13] | UniRef100_Q65M32 | Bacillus licheniformis DSM 13 |
| 1072 | yhcL Sodium:dicarboxylate symporter YhcL | YhcL [Bacillus licheniformis DSM 13] | UniRef100_Q65M31 | Bacillus licheniformis DSM 13 |
| 1073 | yhcM conserved hypothetical protein YhcM | Hypothetical protein [Bacillus licheniformis DSM 13] | UniRef100_Q65M30 | Bacillus licheniformis DSM 13 |
| 1074 | BLP01028 putative amine dehydrogenase | Hypothetical protein [Bacillus licheniformis DSM 13] | UniRef100_Q65M29 | Bacillus licheniformis DSM 13 |
| 1075 | yhcN conserved hypothetical protein YhcN | YhcN [Bacillus licheniformis DSM 13] | UniRef100_Q65M28 | Bacillus licheniformis DSM 13 |
| 1076 | yhcP conserved hypothetical protein YhcP | YhcP [Bacillus licheniformis DSM 13] | UniRef100_Q65M27 | Bacillus licheniformis DSM 13 |
| 1077 | yhcQ conserved hypothetical protein YhcQ | YhcQ [Bacillus licheniformis DSM 13] | UniRef100_Q65M26 | Bacillus licheniformis DSM 13 |
| 1078 | BLP01032 hypothetical protein | | | |
| 1079 | kinEA two-component sensor histidine kinase | Hypothetical protein [Bacillus licheniformis DSM 13] | UniRef100_Q65M25 | Bacillus licheniformis DSM 13 |
| 1080 | BLP01034 hypothetical protein | | | |
| 1081 | yhcR Nucleic acid-binding hydrolase YhcR | YhcR [Bacillus licheniformis DSM 13] | UniRef100_Q65M24 | Bacillus licheniformis DSM 13 |
| 1082 | yhcS putative transferase YhcS | YhcS [Bacillus licheniformis DSM 13] | UniRef100_Q65M23 | Bacillus licheniformis DSM 13 |
| 1083 | yhcT putative Pseudouridine synthase YhcT | YhcT [Bacillus licheniformis DSM 13] | UniRef100_Q65M22 | Bacillus licheniformis DSM 13 |
| 1084 | yhcU conserved hypothetical protein YhcU | YhcU [Bacillus licheniformis DSM 13] | UniRef100_Q65M21 | Bacillus licheniformis DSM 13 |
| 1085 | yhcV ABC transporter YhcV | YhcV [Bacillus licheniformis DSM 13] | UniRef100_Q65M20 | Bacillus licheniformis DSM 13 |
| 1086 | yhcW HAD-superfamily hydrolase YhcW | YhcW [Bacillus licheniformis DSM 13] | UniRef100_Q65M19 | Bacillus licheniformis DSM 13 |
| 1087 | yhcX conserved hypothetical protein YhcX | YhcX [Bacillus licheniformis DSM 13] | UniRef100_Q65M18 | Bacillus licheniformis DSM 13 |
| 1088 | BLP04710 hypothetical protein | | | |
| 1089 | BLP01042 ABC transporter | Hypothetical protein [Bacillus licheniformis DSM 13] | UniRef100_Q65M17 | Bacillus licheniformis DSM 13 |
| 1090 | yrhG Formate_nitrite transporter | YrhG [Bacillus licheniformis DSM 13] | UniRef100_Q65M16 | Bacillus licheniformis DSM 13 |
| 1091 | BLP01044 hypothetical protein | | | |
| 1092 | BLP01045 putative permease | Hypothetical protein [Bacillus licheniformis DSM 13] | UniRef100_Q65M15 | Bacillus licheniformis DSM 13 |
| 1093 | yogA alcohol dehydrogenase YogA | YogA [Bacillus licheniformis DSM 13] | UniRef100_Q65M14 | Bacillus licheniformis DSM 13 |
| 1094 | glpP transcription antiterminator | GlpP [Bacillus licheniformis DSM 13] | UniRef100_Q65M13 | Bacillus licheniformis DSM 13 |
| 1095 | glpF glycerol uptake facilitator | GlpF [Bacillus licheniformis DSM 13] | UniRef100_Q65M12 | Bacillus licheniformis DSM 13 |
| 1096 | glpK glycerol kinase | GlpK [Bacillus licheniformis DSM 13] | UniRef100_Q65M11 | Bacillus licheniformis DSM 13 |
| 1097 | glpD glycerol-3-phosphate dehydrogenase | GlpD [Bacillus licheniformis DSM 13] | UniRef100_Q65M10 | Bacillus licheniformis DSM 13 |
| 1098 | BLP01051 hypothetical protein | | | |
| 1099 | pgcA Alpha Phosphoglucomutase PgcA | YhxB [Bacillus licheniformis DSM 13] | UniRef100_Q65M09 | Bacillus licheniformis DSM 13 |
| 1100 | BLP01053 hypothetical protein | Hypothetical protein [Bacillus licheniformis DSM 13] | UniRef100_Q65M08 | Bacillus licheniformis DSM 13 |
| 1101 | BLP01054 putative transcriptional regulator | Hypothetical protein [Bacillus licheniformis DSM 13] | UniRef100_Q65M07 | Bacillus licheniformis DSM 13 |
| 1102 | yhcY ATP-binding region protein | ATP-binding region, ATPase-like, GAF [Bacillus licheniformis | UniRef100_Q62XE3 | Bacillus licheniformis DSM 13 |
| | | DSM 13] | | |
| 1103 | yhcZ putative transcriptional regulator YhcZ | YhcZ [Bacillus licheniformis DSM 13] | UniRef100_Q65M05 | Bacillus licheniformis DSM 13 |
| 1104 | yhdA putative NADPH-dependent FMN reductase | NADPH-dependent FMN reductase [Bacillus licheniformis | UniRef100_Q62XE1 | Bacillus licheniformis DSM 13 |
| | YhdA | DSM 13] | | |
| 1105 | yhdB conserved hypothetical protein YhdB | YhdB [Bacillus licheniformis DSM 13] | UniRef100_Q65M03 | Bacillus licheniformis DSM 13 |
| 1106 | yhdC conserved hypothetical protein | YhdC [Bacillus licheniformis DSM 13] | UniRef100_Q65M02 | Bacillus licheniformis DSM 13 |
| 1107 | yhdE conserved hypothetical protein YhdE | YhdE [Bacillus licheniformis DSM 13] | UniRef100_Q65M01 | Bacillus licheniformis DSM 13 |
| 1108 | BLP04711 hypothetical protein | | | |
| 1109 | hmp flavohemoglobin | Hmp [Bacillus licheniformis DSM 13] | UniRef100_Q65M00 | Bacillus licheniformis DSM 13 |
| 1110 | spoVR Stage V sporulation protein R, spoVR | Hypothetical protein spoVR [Bacillus licheniformis DSM 13] | UniRef100_Q65LZ9 | Bacillus licheniformis DSM 13 |
| 1111 | BLP01063 hypothetical protein | | | |
| 1112 | BLP04712 hypothetical protein | | | |
| 1113 | lytE cell wall hydrolase phosphatase-associated | LytE [Bacillus licheniformis DSM 13] | UniRef100_Q65LZ8 | Bacillus licheniformis DSM 13 |
| | protein | | | |
| 1114 | citR transcriptional regulator CitR | CitR [Bacillus licheniformis DSM 13] | UniRef100_Q65LZ7 | Bacillus licheniformis DSM 13 |
| 1115 | citA citrate synthase I | CitA [Bacillus licheniformis DSM 13] | UniRef100_Q65LZ6 | Bacillus licheniformis DSM 13 |
| 1116 | BLP01067 putative glucose dehydrogenase | Hypothetical Soluble quinoprotein glucose dehydrogenase | UniRef100_Q65LZ5 | Bacillus licheniformis DSM 13 |
| | | [Bacillus licheniformis DSM 13] | | |
| 1117 | yhdF Short-chain dehydrogenase_reductase SDR | YhdF [Bacillus licheniformis DSM 13] | UniRef100_Q65LZ4 | Bacillus licheniformis DSM 13 |
| | YhdF | | | |
| 1118 | BLP01069 hypothetical protein | | | |
| 1119 | yhdH putative Sodium:neurotransmitter symporter | YhdH [Bacillus licheniformis DSM 13] | UniRef100_Q65LZ3 | Bacillus licheniformis DSM 13 |
| | YhdH | | | |
| 1120 | BLP01071 putative aminoacid decarboxylase | Hypothetical protein [Bacillus licheniformis DSM 13] | UniRef100_Q65LZ2 | Bacillus licheniformis DSM 13 |
| 1121 | ydeE putative transcriptional regulator YdeE | YdeE [Bacillus licheniformis DSM 13] | UniRef100_Q65LZ1 | Bacillus licheniformis DSM 13 |
| 1122 | ydeL conserved hypothetical YdeL | YdeL [Bacillus licheniformis DSM 13] | UniRef100_Q65LZ0 | Bacillus licheniformis DSM 13 |
| 1123 | yhdJ GCN5-related N-acetyltransferase | YhdJ [Bacillus licheniformis DSM 13] | UniRef100_Q65LY9 | Bacillus licheniformis DSM 13 |
| 1124 | yhdK conserved hypothetical protein | YhdK [Bacillus licheniformis DSM 13] | UniRef100_Q65LY8 | Bacillus licheniformis DSM 13 |
| 1125 | yhdL conserved hypothetical protein | YhdL [Bacillus licheniformis DSM 13] | UniRef100_Q65LY7 | Bacillus licheniformis DSM 13 |
| 1126 | sigM RNA polymerase ECF(extracytoplasmic | SigM (RNA polymerase ECF(Extracytoplasmic function)-type | UniRef100_Q65LY6 | Bacillus licheniformis DSM 13 |
| | function)-type sigma factor (sigma-M) | sigma factor) [Bacillus licheniformis DSM 13] | | |
| 1127 | yrkC conserved hypothetical protein | Hypothetical protein [Bacillus licheniformis DSM 13] | UniRef100_Q65LY5 | Bacillus licheniformis DSM 13 |
| 1128 | BLP01079 hypothetical protein | | | |
| 1129 | plsC 1-acylglycerol-3-phosphate O-acyltransferase | YhdO [Bacillus licheniformis DSM 13] | UniRef100_Q65LY4 | Bacillus licheniformis DSM 13 |
| 1130 | BLP01081 hypothetical protein | | | |
| 1131 | BLP01082 conserved hypothetical protein | Hypothetical protein [Bacillus licheniformis DSM 13] | UniRef100_Q65LY3 | Bacillus licheniformis DSM 13 |
| 1132 | BLP01083 conserved hypothetical protein | Hypothetical protein [Bacillus licheniformis DSM 13] | UniRef100_Q65LY2 | Bacillus licheniformis DSM 13 |
| 1133 | BLP01084 putative transcriptional regulator | Hypothetical protein [Bacillus licheniformis DSM 13] | UniRef100_Q65LY1 | Bacillus licheniformis DSM 13 |
| 1134 | yhdP CBS domain, conserved hypothetical protein | YhdP [Bacillus licheniformis DSM 13] | UniRef100_Q65LY0 | Bacillus licheniformis DSM 13 |
| | YhdP | | | |
| 1135 | cueR transcriptional activator | YhdQ [Bacillus licheniformis DSM 13] | UniRef100_Q65LX9 | Bacillus licheniformis DSM 13 |
| 1136 | yhdT CBS domain conserved hypothetical protein | YhdT [Bacillus licheniformis DSM 13] | UniRef100_Q65LX8 | Bacillus licheniformis DSM 13 |
| | YhdT | | | |
| 1137 | BLP01088 hypothetical protein | Hypothetical protein [Bacillus licheniformis DSM 13] | UniRef100_Q65LX7 | Bacillus licheniformis DSM 13 |
| 1138 | BLP01089 hypothetical protein | Hypothetical protein [Bacillus licheniformis DSM 13] | UniRef100_Q65LX6 | Bacillus licheniformis DSM 13 |
| 1139 | BLP01090 N-acetylmuramoyl-L-alanine amidase | Hypothetical protein [Bacillus licheniformis DSM 13] | UniRef100_Q65LX5 | Bacillus licheniformis DSM 13 |
| 1140 | crcB1 integral membrane protein possibly involved in | YhdU [Bacillus licheniformis DSM 13] | UniRef100_Q65LX4 | Bacillus licheniformis DSM 13 |
| | chromosome condensation | | | |
| 1141 | crcB2 Protein secE_sec61-gamma protein | Hypothetical protein [Bacillus licheniformis DSM 13] | UniRef100_Q65LX3 | Bacillus licheniformis DSM 13 |
| 1142 | yhdW Glycerophosphoryl diester phosphodiesterase | YhdW [Bacillus licheniformis DSM 13] | UniRef100_Q65LX2 | Bacillus licheniformis DSM 13 |
| | YhdW | | | |
| 1143 | yhdX conserved hypothetical YhdX | YhdX [Bacillus licheniformis DSM 13] | UniRef100_Q65LX1 | Bacillus licheniformis DSM 13 |
| 1144 | yhdY putative mechanosensitive ion channel protein, | YhdY [Bacillus licheniformis DSM 13] | UniRef100_Q65LX0 | Bacillus licheniformis DSM 13 |
| | conserved hypothetical YhdY | | | |
| 1145 | npdA NdpA | YhdZ [Bacillus licheniformis DSM 13] | UniRef100_Q65LW9 | Bacillus licheniformis DSM 13 |
| 1146 | BLP01097 N-acetyltransferase | Hypothetical protein [Bacillus licheniformis DSM 13] | UniRef100_Q65LW8 | Bacillus licheniformis DSM 13 |
| 1147 | BLP01098 Polysaccharide deacetylase, Carbohydrate | YheN [Bacillus licheniformis DSM 13] | UniRef100_Q65LW7 | Bacillus licheniformis DSM 13 |
| | Esterase Family 4 | | | |
| 1148 | BLP01099 hypothetical protein | | | |
| 1149 | dat D-alanine aminotransferase | Dat [Bacillus licheniformis DSM 13] | UniRef100_Q65LW6 | Bacillus licheniformis DSM 13 |
| 1150 | nhaC Na_H antiporter | NhaC [Bacillus licheniformis DSM 13] | UniRef100_Q65LW5 | Bacillus licheniformis DSM 13 |
| 1151 | BLP01102 hypothetical protein | | | |
| 1152 | yoxA conserved hypothetical protein YoxA | YoxA [Bacillus licheniformis DSM 13] | UniRef100_Q65LW4 | Bacillus licheniformis DSM 13 |
| 1153 | BLP01105 hypothetical protein | | | |
| 1154 | BLP01106 hypothetical protein | Hypothetical protein [Bacillus thuringiensis] | UniRef100_Q6HKJ9 | Bacillus thuringiensis |
| 1155 | ydhH hypothetical protein | YdhH [Bacillus licheniformis DSM 13] | UniRef100_Q65LW3 | Bacillus licheniformis DSM 13 |
| 1156 | BLP01108 conserved hypothetical protein | Hypothetical protein [Bacillus licheniformis DSM 13] | UniRef100_Q65LW2 | Bacillus licheniformis DSM 13 |
| 1157 | BLP01109 hypothetical protein | Hypothetical protein [Bacillus licheniformis DSM 13] | UniRef100_Q65LW1 | Bacillus licheniformis DSM 13 |
| 1158 | BLP01110 hypothetical protein | | | |
| 1159 | nhaX stress response protein, NhaX | Hypothetical protein nhaX [Bacillus licheniformis DSM 13] | UniRef100_Q65LW0 | Bacillus licheniformis DSM 13 |
| 1160 | BLP01112 hypothetical protein | | | |
| 1161 | yheI ABC transporter YheI | YheI [Bacillus licheniformis DSM 13] | UniRef100_Q65LV9 | Bacillus licheniformis DSM 13 |
| 1162 | yheH ABC transporter YheH | YheH [Bacillus licheniformis DSM 13] | UniRef100_Q65LV8 | Bacillus licheniformis DSM 13 |
| 1163 | yheG conserved hypothetical protein | Hypothetical protein [Bacillus licheniformis DSM 13] | UniRef100_Q62X94 | Bacillus licheniformis DSM 13 |
| 1164 | BLP01116 hypothetical protein | | | |
| 1165 | sspB small acid-soluble spore protein (beta-type) | SspB [Bacillus licheniformis DSM 13] | UniRef100_Q65LV6 | Bacillus licheniformis DSM 13 |
| 1166 | BLP01118 hypothetical protein | Hypothetical protein [Bacillus licheniformis DSM 13] | UniRef100_Q65LV5 | Bacillus licheniformis DSM 13 |
| 1167 | msmX multiple sugar-binding transport ATP-binding | MsmX [Bacillus licheniformis DSM 13] | UniRef100_Q65LV4 | Bacillus licheniformis DSM 13 |
| | protein | | | |
| 1168 | BLP01120 hypothetical protein with helix-turn-helix | YxkF [Bacillus licheniformis DSM 13] | UniRef100_Q65LV3 | Bacillus licheniformis DSM 13 |
| | domain | | | |
| 1169 | yheE conserved hypothetical protein YheE | YheE [Bacillus licheniformis DSM 13] | UniRef100_Q65LV2 | Bacillus licheniformis DSM 13 |
| 1170 | BLP01122 hypothetical protein | | | |
| 1171 | yheD conserved hypothetical protein YheD | YheD [Bacillus licheniformis DSM 13] | UniRef100_Q65LV1 | Bacillus licheniformis DSM 13 |
| 1172 | yheC conserved hypothetical protein YheC | YheC [Bacillus licheniformis DSM 13] | UniRef100_Q65LV0 | Bacillus licheniformis DSM 13 |
| 1173 | yheB conserved hypothetical protein YheB | Hypothetical protein [Bacillus licheniformis DSM 13] | UniRef100_Q62X86 | Bacillus licheniformis DSM 13 |
| 1174 | yheA conserved hypothetical protein YheA | YheA [Bacillus licheniformis DSM 13] | UniRef100_Q65LU8 | Bacillus licheniformis DSM 13 |
| 1175 | BLP01127 hypothetical protein | | | |
| 1176 | BLP04814 unassigned | Hypothetical protein [Bacillus licheniformis DSM 13] | UniRef100_Q65LU7 | Bacillus licheniformis DSM 13 |
| 1177 | BLP01128 hypothetical protein | | | |
| 1178 | yhaX HAD-superfamily hydrolase protein YhaX | YhaX [Bacillus licheniformis DSM 13] | UniRef100_Q65LU6 | Bacillus licheniformis DSM 13 |
| 1179 | hemZ coproporphyrinogen III oxidase | Coproporphyrinogen III oxidase [Bacillus licheniformis DSM | UniRef100_Q62X83 | Bacillus licheniformis DSM 13 |
| | | 13] | | |
| 1180 | BLP01131 hypothetical protein | Hypothetical protein yhaU [Bacillus subtilis] | UniRef100_O07536 | Bacillus subtilis |
| 1181 | BLP01132 hypothetical protein | Hypothetical protein yhaT [Bacillus subtilis] | UniRef100_O07535 | Bacillus subtilis |
| 1182 | yhaR Enoyl-CoA hydratase_isomerase YhaR | YhaR [Bacillus licheniformis DSM 13] | UniRef100_Q65LU4 | Bacillus licheniformis DSM 13 |
| 1183 | BLP01134 hypothetical protein | | | |
| 1184 | BLP01135 conserved hypothetical protein | Hypothetical protein [Bacillus licheniformis DSM 13] | UniRef100_Q65LU2 | Bacillus licheniformis DSM 13 |
| 1185 | BLP01136 hypothetical protein | Hypothetical protein [Bacillus licheniformis DSM 13] | UniRef100_Q65LU1 | Bacillus licheniformis DSM 13 |
| 1186 | yhaQ ABC transporter YhaQ | YhaQ [Bacillus licheniformis DSM 13] | UniRef100_Q65LU0 | Bacillus licheniformis DSM 13 |
| 1187 | yhaP conserved hypothetical protein YhaP | YhaP [Bacillus licheniformis DSM 13] | UniRef100_Q65LT9 | Bacillus licheniformis DSM 13 |
| 1188 | yhaO conserved hypothetical protein YhaO | YhaO [Bacillus licheniformis DSM 13] | UniRef100_Q65LT8 | Bacillus licheniformis DSM 13 |
| 1189 | yhaN conserved hypothetical protein YhaN | YhaN [Bacillus licheniformis DSM 13] | UniRef100_Q65LT7 | Bacillus licheniformis DSM 13 |
| 1190 | yhaM Nucleic acid-binding protein YhaM | YhaM [Bacillus licheniformis DSM 13] | UniRef100_Q65LT6 | Bacillus licheniformis DSM 13 |
| 1191 | yhaL conserved hypothetical protein YhaL | YhaL [Bacillus licheniformis DSM 13] | UniRef100_Q65LT5 | Bacillus licheniformis DSM 13 |
| 1192 | prsA molecular chaperone PrsA | PrsA [Bacillus licheniformis DSM 13] | UniRef100_Q65LT4 | Bacillus licheniformis DSM 13 |
| 1193 | BLP04850 conserved hypothetical protein | | | |
| 1194 | BLP01144 conserved hypothetical protein | Hypothetical protein [Bacillus licheniformis DSM 13] | UniRef100_Q65LT1 | Bacillus licheniformis DSM 13 |
| 1195 | yhaK conserved hypothetical protein YhaK | Hypothetical protein [Bacillus licheniformis DSM 13] | UniRef100_Q65LT0 | Bacillus licheniformis DSM 13 |
| 1196 | yhaI conserved hypothetical protein YhaI | YhaI [Bacillus licheniformis DSM 13] | UniRef100_Q65LS9 | Bacillus licheniformis DSM 13 |
| 1197 | hpr transcriptional regulator Hpr | Hpr [Bacillus licheniformis DSM 13] | UniRef100_Q65LS8 | Bacillus licheniformis DSM 13 |
| 1198 | yhaH conserved hypothetical protein YhaH | YhaH [Bacillus licheniformis DSM 13] | UniRef100_Q65LS7 | Bacillus licheniformis DSM 13 |
| 1199 | BLP01149 conserved hypothetical protein | Hypothetical protein [Bacillus licheniformis DSM 13] | UniRef100_Q65LS6 | Bacillus licheniformis DSM 13 |
| 1200 | trpP possible transmembrane protein involved in | YhaG [Bacillus licheniformis DSM 13] | UniRef100_Q65LS5 | Bacillus licheniformis DSM 13 |
| | tryptophan transport | | | |
| 1201 | serC phosphoserine aminotransferase | SerC [Bacillus licheniformis DSM 13] | UniRef100_Q65LS4 | Bacillus licheniformis DSM 13 |
| 1202 | hit cell-cycle regulation protein-Hit | Hit [Bacillus licheniformis DSM 13] | UniRef100_Q65LS3 | Bacillus licheniformis DSM 13 |
| 1203 | BLP01153 hypothetical protein | Hypothetical protein [Bacillus licheniformis DSM 13] | UniRef100_Q65LS2 | Bacillus licheniformis DSM 13 |
| 1204 | ecsA ABC transporter (ATP-binding protein) | EcsA [Bacillus licheniformis DSM 13] | UniRef100_Q65LS1 | Bacillus licheniformis DSM 13 |
| 1205 | ecsB ABC transporter (membrane protein) | EcsB [Bacillus licheniformis DSM 13] | UniRef100_Q65LS0 | Bacillus licheniformis DSM 13 |
| 1206 | ecsC EscC | Hypothetical protein ecsC [Bacillus licheniformis DSM 13] | UniRef100_Q65LR9 | Bacillus licheniformis DSM 13 |
| 1207 | yhaA putative amidohydrolase YhaA | YhaA [Bacillus licheniformis DSM 13] | UniRef100_Q65LR8 | Bacillus licheniformis DSM 13 |
| 1208 | BLP04713 hypothetical protein | | | |
| 1209 | yhfA conserved hypothetical protein YhfA | YhfA [Bacillus licheniformis DSM 13] | UniRef100_Q65LR7 | Bacillus licheniformis DSM 13 |
| 1210 | yhgC conserved hypothetical protein YhgC | YhgC [Bacillus licheniformis DSM 13] | UniRef100_Q65LR6 | Bacillus licheniformis DSM 13 |
| 1211 | pbpF penicillin-binding protein, putative glycosyl | PbpF [Bacillus licheniformis DSM 13] | UniRef100_Q65LR5 | Bacillus licheniformis DSM 13 |
| | transferase family 51 | | | |
| 1212 | hemE uroporphyrinogen III decarboxylase | HemE [Bacillus licheniformis DSM 13] | UniRef100_Q65LR4 | Bacillus licheniformis DSM 13 |
| 1213 | hemH ferrochelatase | HemH [Bacillus licheniformis DSM 13] | UniRef100_Q65LR3 | Bacillus licheniformis DSM 13 |
| 1214 | hemY protoporphyrinogen IX and coproporphyrinogen | HemY [Bacillus licheniformis DSM 13] | UniRef100_Q65LR2 | Bacillus licheniformis DSM 13 |
| | III oxidase | | | |
| 1215 | BLP01164 hypothetical protein | | | |
| 1216 | yhgD putative transcriptional regulator | YhgD [Bacillus licheniformis DSM 13] | UniRef100_Q65LR1 | Bacillus licheniformis DSM 13 |
| 1217 | yhgE conserved hypothetical protein YhgE | YhgE [Bacillus licheniformis DSM 13] | UniRef100_Q65LR0 | Bacillus licheniformis DSM 13 |
| 1218 | fabHB beta-ketoacyl-acyl carrier protein synthase III | FabHB [Bacillus licheniformis DSM 13] | UniRef100_Q65LQ9 | Bacillus licheniformis DSM 13 |
| 1219 | yhfE putative glucanase_aminopeptidase YhfE | YhfE [Bacillus licheniformis DSM 13] | UniRef100_Q65LQ8 | Bacillus licheniformis DSM 13 |
| 1220 | BLP01169 hypothetical protein | | | |
| 1221 | gltT proton_sodium-glutamate symport protein | GltT [Bacillus licheniformis DSM 13] | UniRef100_Q65LQ6 | Bacillus licheniformis DSM 13 |
| 1222 | BLP04815 conserved hypothetical YfhH | Hypothetical protein yhfH [Bacillus subtilis] | UniRef100_O07606 | Bacillus subtilis |
| 1223 | yhfI putative hydrolase. conserved hypothetical | YhfI [Bacillus licheniformis DSM 13] | UniRef100_Q65LQ5 | Bacillus licheniformis DSM 13 |
| | protein | | | |
| 1224 | yhfJ putative Lipoyltransferase and lipoate-protein | YhfJ [Bacillus licheniformis DSM 13] | UniRef100_Q65LQ4 | Bacillus licheniformis DSM 13 |
| | ligase | | | |
| 1225 | yhfL AMP-dependent synthetase and ligase | YhfL [Bacillus licheniformis DSM 13] | UniRef100_Q65LQ3 | Bacillus licheniformis DSM 13 |
| 1226 | yhfM conserved hypothetical protein | Hypothetical protein [Bacillus licheniformis DSM 13] | UniRef100_Q65LQ2 | Bacillus licheniformis DSM 13 |
| 1227 | BLP01175 putative transcriptional regulator | Hypothetical protein [Bacillus licheniformis DSM 13] | UniRef100_Q65LQ1 | Bacillus licheniformis DSM 13 |
| 1228 | azlC putative branched chain aminoacid transporter | Hypothetical protein azlC [Bacillus licheniformis DSM 13] | UniRef100_Q65LQ0 | Bacillus licheniformis DSM 13 |
| 1229 | BLP01177 conserved hypothetical protein | Hypothetical protein [Bacillus licheniformis DSM 13] | UniRef100_Q65LP9 | Bacillus licheniformis DSM 13 |
| 1230 | yhfN putative metallopeptidase YhfN | YhfN [Bacillus licheniformis DSM 13] | UniRef100_Q65LP8 | Bacillus licheniformis DSM 13 |
| 1231 | kerA KerA | Subtilisin Carlsberg precursor [Bacillus licheniformis] | UniRef100_P00780 | Bacillus licheniformis |
| 1232 | ydeD putative membrane protein, transporter YdeD | YdeD [Bacillus licheniformis DSM 13] | UniRef100_Q65LP6 | Bacillus licheniformis DSM 13 |
| 1233 | yhfQ putative transferase | YhfQ [Bacillus licheniformis DSM 13] | UniRef100_Q65LP5 | Bacillus licheniformis DSM 13 |
| 1234 | yfmD putative transport system permease protein | YfmD [Bacillus licheniformis DSM 13] | UniRef100_Q65LP4 | Bacillus licheniformis DSM 13 |
| | YfmD | | | |
| 1235 | yfmE conserved hypothetical YfmE | YfmE [Bacillus licheniformis DSM 13] | UniRef100_Q65LP3 | Bacillus licheniformis DSM 13 |
| 1236 | yhfR putative Phosphoglycerate_bisphosphoglycerate | YhfR [Bacillus licheniformis DSM 13] | UniRef100_Q65LP2 | Bacillus licheniformis DSM 13 |
| | mutase YhfR | | | |
| 1237 | BLP01185 hypothetical protein | | | |
| 1238 | hemAT haem-based aerotactic transducer | HemAT [Bacillus licheniformis DSM 13] | UniRef100_Q65LP1 | Bacillus licheniformis DSM 13 |
| 1239 | yhfW putative oxidoreductase YhfW | YhfW [Bacillus licheniformis DSM 13] | UniRef100_Q65LP0 | Bacillus licheniformis DSM 13 |
| 1240 | yhxC Short-chain dehydrogenase_reductase SDR | YhxC [Bacillus licheniformis DSM 13] | UniRef100_Q65LN9 | Bacillus licheniformis DSM 13 |
| | YhxC | | | |
| 1241 | yhzC conserved hypothetical protein YhzC | YhzC [Bacillus licheniformis DSM 13] | UniRef100_Q65LN8 | Bacillus licheniformis DSM 13 |
| 1242 | comK competence transcription factor ComK | ComK [Bacillus licheniformis DSM 13] | UniRef100_Q65LN7 | Bacillus licheniformis DSM 13 |
| 1243 | yhjD conserved hypothetical protein YhjD | YhjD [Bacillus licheniformis DSM 13] | UniRef100_Q65LN6 | Bacillus licheniformis DSM 13 |
| 1244 | BLP04714 hypothetical protein | | | |
| 1245 | yhjE conserved hypothetical protein YhjE | YhjE [Bacillus licheniformis DSM 13] | UniRef100_Q65LN5 | Bacillus licheniformis DSM 13 |
| 1246 | sipV type I signal peptidase | SipV [Bacillus licheniformis DSM 13] | UniRef100_Q65LN4 | Bacillus licheniformis DSM 13 |
| 1247 | epr extracellular serine protease | Epr [Bacillus licheniformis DSM 13] | UniRef100_Q65LN3 | Bacillus licheniformis DSM 13 |
| 1248 | BLP01195 Major facilitator superfamily, putative | Hypothetical protein [Bacillus licheniformis DSM 13] | UniRef100_Q65LN2 | Bacillus licheniformis DSM 13 |
| | transporter | | | |
| 1249 | BLP01196 transcriptional regulator | Hypothetical protein [Bacillus licheniformis DSM 13] | UniRef100_Q65LN1 | Bacillus licheniformis DSM 13 |
| 1250 | BLP01197 Putative hydantoin utilization protein | Hypothetical protein [Bacillus licheniformis DSM 13] | UniRef100_Q65LM9 | Bacillus licheniformis DSM 13 |
| 1251 | BLP01198 conserved hypothetical protein | Hypothetical protein [Bacillus licheniformis DSM 13] | UniRef100_Q65LM8 | Bacillus licheniformis DSM 13 |
| 1252 | BLP01199 Ureidoglycolate dehydrogenase | Hypothetical protein [Bacillus licheniformis DSM 13] | UniRef100_Q65LM7 | Bacillus licheniformis DSM 13 |
| 1253 | yjmC putative ureidoglycolate dehydrogenase YjmC | YjmC [Bacillus licheniformis DSM 13] | UniRef100_Q65LM6 | Bacillus licheniformis DSM 13 |
| 1254 | BLP01201 putative oxidoreductase | Hypothetical protein [Bacillus licheniformis DSM 13] | UniRef100_Q65LM5 | Bacillus licheniformis DSM 13 |
| 1255 | ylbE conserved hypothetical protein | Hypothetical protein [Bacillus licheniformis DSM 13] | UniRef100_Q65LM4 | Bacillus licheniformis DSM 13 |
| 1256 | BLP01203 conserved hypothetical protein | Hypothetical protein [Bacillus licheniformis DSM 13] | UniRef100_Q65LM3 | Bacillus licheniformis DSM 13 |
| 1257 | BLP01204 carbamate kinase | Hypothetical protein [Bacillus licheniformis DSM 13] | UniRef100_Q65LM2 | Bacillus licheniformis DSM 13 |
| 1258 | BLP01205 putative transporter, membrane protein | Hypothetical protein [Bacillus licheniformis DSM 13] | UniRef100_Q65LM1 | Bacillus licheniformis DSM 13 |
| 1259 | BLP01206 conserved hypothetical protein | Hypothetical protein [Bacillus licheniformis DSM 13] | UniRef100_Q65LM0 | Bacillus licheniformis DSM 13 |
| 1260 | rapG response regulator aspartate phosphatase | RapG [Bacillus licheniformis DSM 13] | UniRef100_Q65LL9 | Bacillus licheniformis DSM 13 |
| 1261 | phrG regulator of the activity of phosphatase RapG - | Regulator of the activity of phosphatase RapG [Bacillus | UniRef100_Q62X10 | Bacillus licheniformis DSM 13 |
| | PhrG | licheniformis DSM 13] | | |
| 1262 | BLP01209 hypothetical protein | | | |
| 1263 | BLP04715 hypothetical protein | | | |
| 1264 | BLP04716 conserved hypothetical protein | Hypothetical protein [Bacillus licheniformis DSM 13] | UniRef100_Q65LL8 | Bacillus licheniformis DSM 13 |
| 1265 | BLP01210 hypothetical protein | | | |
| 1266 | BLP01211 hypothetical protein | | | |
| 1267 | msmR transcriptional regulator MsmR | MsmR [Bacillus licheniformis DSM 13] | UniRef100_Q65LL7 | Bacillus licheniformis DSM 13 |
| 1268 | msmE multiple sugar-binding protein MsmE | MsmE [Bacillus licheniformis DSM 13] | UniRef100_Q65LL6 | Bacillus licheniformis DSM 13 |
| 1269 | amyD sugar transporter AmyD | Hypothetical protein amyD [Bacillus licheniformis DSM 13] | UniRef100_Q65LL5 | Bacillus licheniformis DSM 13 |
| 1270 | amyC maltose transport protein AmyC | AmyC [Bacillus licheniformis DSM 13] | UniRef100_Q65LL4 | Bacillus licheniformis DSM 13 |
| 1271 | melA alpha-D-galactoside galactohydrolase, | MelA [Bacillus licheniformis DSM 13] | UniRef100_Q65LL3 | Bacillus licheniformis DSM 13 |
| | Glycoside Hydrolase Family 4, MelA | | | |
| 1272 | yhjN conserved hypothetical protein | YhjN [Bacillus licheniformis DSM 13] | UniRef100_Q65LL2 | Bacillus licheniformis DSM 13 |
| 1273 | cotJA CotJA | CotJA [Bacillus licheniformis DSM 13] | UniRef100_Q65LL1 | Bacillus licheniformis DSM 13 |
| 1274 | cotJB CotJB | Hypothetical protein cotJB [Bacillus licheniformis DSM 13] | UniRef100_Q65LL0 | Bacillus licheniformis DSM 13 |
| 1275 | cotJC CotJC | Hypothetical protein cotJC [Bacillus licheniformis DSM 13] | UniRef100_Q65LK9 | Bacillus licheniformis DSM 13 |
| 1276 | ynglA long-chain fatty-acid-CoA ligase | Hypothetical protein [Bacillus licheniformis DSM 13] | UniRef100_Q65LK8 | Bacillus licheniformis DSM 13 |
| 1277 | yhjO conserved hypothetical protein YhjO | Hypothetical protein yhjO [Bacillus subtilis] | UniRef100_O07569 | Bacillus subtilis |
| 1278 | yhjP YhjP | Hypothetical protein yhjP [Bacillus subtilis] | UniRef100_O07570 | Bacillus subtilis |
| 1279 | BLP01224 conserved hypothetical protein | Hypothetical protein [Bacillus licheniformis DSM 13] | UniRef100_Q65LK6 | Bacillus licheniformis DSM 13 |
| 1280 | BLP01225 two-component sensor histidine kinase | Hypothetical protein [Bacillus licheniformis DSM 13] | UniRef100_Q65LK5 | Bacillus licheniformis DSM 13 |
| 1281 | BLP01226 Two-component response regulator | Hypothetical protein [Bacillus licheniformis DSM 13] | UniRef100_Q65LK4 | Bacillus licheniformis DSM 13 |
| 1282 | yhjR conserved hypothetical protein YhjR | Ferritin/ribonucleotide reductase-like [Bacillus licheniformis | UniRef100_Q62WZ4 | Bacillus licheniformis DSM 13 |
| | | DSM 13] | | |
| 1283 | yvgL molybdate transport system substrate-binding | YvgL [Bacillus licheniformis DSM 13] | UniRef100_Q65LK2 | Bacillus licheniformis DSM 13 |
| | protein | | | |
| 1284 | yvgM molybdate transport system permease protein | YvgM [Bacillus licheniformis DSM 13] | UniRef100_Q65LK1 | Bacillus licheniformis DSM 13 |
| 1285 | addB ATP-dependent deoxyribonuclease (subunit B) | AddB [Bacillus licheniformis DSM 13] | UniRef100_Q65LK0 | Bacillus licheniformis DSM 13 |
| 1286 | addA ATP-dependent deoxyribonuclease (subunit A) | AddA [Bacillus licheniformis DSM 13] | UniRef100_Q65LJ9 | Bacillus licheniformis DSM 13 |
| 1287 | sbcD exonuclease SbcD | Exonuclease SbcD homolog [Bacillus licheniformis DSM 13] | UniRef100_Q65LJ8 | Bacillus licheniformis DSM 13 |
| 1288 | sbcC ABC transporter, exonuclease SbcC | YirY (RNA-binding region RNP-1 (RNA recognition motif), ABC | UniRef100_Q65LJ7 | Bacillus licheniformis DSM 13 |
| | | transporter) [Bacillus licheniformis DSM 13] | | |
| 1289 | gerPF spore germination protein | GerPF [Bacillus licheniformis DSM 13] | UniRef100_Q65LJ6 | Bacillus licheniformis DSM 13 |
| 1290 | gerPE spore germination protein | GerPE [Bacillus licheniformis DSM 13] | UniRef100_Q65LJ5 | Bacillus licheniformis DSM 13 |
| 1291 | gerPD sporulation protein GerPD | GerPD [Bacillus licheniformis DSM 13] | UniRef100_Q65LJ4 | Bacillus licheniformis DSM 13 |
| 1292 | BLP01236 hypothetical protein | | | |
| 1293 | gerPC spore germination protein | GerPC [Bacillus licheniformis DSM 13] | UniRef100_Q65LJ3 | Bacillus licheniformis DSM 13 |
| 1294 | gerPB spore germination protein | GerPB [Bacillus licheniformis DSM 13] | UniRef100_Q65LJ2 | Bacillus licheniformis DSM 13 |
| 1295 | gerPA spore germination protein | GerPA [Bacillus licheniformis DSM 13] | UniRef100_Q65LJ1 | Bacillus licheniformis DSM 13 |
| 1296 | yitR YitR | Hypothetical protein yitR [Bacillus licheniformis DSM 13] | UniRef100_Q65LJ0 | Bacillus licheniformis DSM 13 |
| 1297 | yisI YisI | Hypothetical protein yisI [Bacillus licheniformis DSM 13] | UniRef100_Q62WY0 | Bacillus licheniformis DSM 13 |
| 1298 | cotH spore coat protein (inner) | CotH [Bacillus licheniformis DSM 13] | UniRef100_Q65LI8 | Bacillus licheniformis DSM 13 |
| 1299 | BLP01243 hypothetical protein | Hypothetical protein [Bacillus licheniformis DSM 13] | UniRef100_Q65LI7 | Bacillus licheniformis DSM 13 |
| 1300 | yisK Fumarylacetoacetate (FAA) hydrolase YisK | YisK (Fumarylacetoacetate (FAA) hydrolase) [Bacillus | UniRef100_Q65LI6 | Bacillus licheniformis DSM 13 |
| | | licheniformis DSM 13] | | |
| 1301 | engCA GTP-binding protein | Hypothetical protein engCA [Bacillus licheniformis DSM 13] | UniRef100_Q65LI5 | Bacillus licheniformis DSM 13 |
| 1302 | BLP01246 hypothetical protein | | | |
| 1303 | yisL conserved membrane protein | YisL [Bacillus licheniformis DSM 13] | UniRef100_Q65LI4 | Bacillus licheniformis DSM 13 |
| 1304 | yisN YisN | Hypothetical protein yisN [Bacillus licheniformis DSM 13] | UniRef100_Q65LI3 | Bacillus licheniformis DSM 13 |
| 1305 | asnO asparagine synthetase | AsnO [Bacillus licheniformis DSM 13] | UniRef100_Q65LI2 | Bacillus licheniformis DSM 13 |
| 1306 | BLP01250 ammonium transporter | Hypothetical protein [Bacillus licheniformis DSM 13] | UniRef100_Q65LI1 | Bacillus licheniformis DSM 13 |
| 1307 | nrgBA nitrogen-regulated PII-like protein | Hypothetical protein [Bacillus licheniformis DSM 13] | UniRef100_Q65LI0 | Bacillus licheniformis DSM 13 |
| 1308 | yisQ probable transporter YisQ | YisQ [Bacillus licheniformis DSM 13] | UniRef100_Q65LH9 | Bacillus licheniformis DSM 13 |
| 1309 | yisR probable transcriptional regulator | YisR [Bacillus licheniformis DSM 13] | UniRef100_Q65LH8 | Bacillus licheniformis DSM 13 |
| 1310 | BLP01254 N-acetyltransferase | YokL [Bacillus licheniformis DSM 13] | UniRef100_Q65LH7 | Bacillus licheniformis DSM 13 |
| 1311 | degA transcriptional regulator | DegA [Bacillus licheniformis DSM 13] | UniRef100_Q65LH6 | Bacillus licheniformis DSM 13 |
| 1312 | yisS putative oxidoreductase | YisS [Bacillus licheniformis DSM 13] | UniRef100_Q65LH5 | Bacillus licheniformis DSM 13 |
| 1313 | BLP01257 hypothetical protein | Spore germination protein GerHC [Bacillus anthracis] | UniRef100_Q81KL1 | Bacillus anthracis |
| 1314 | BLP01258 hypothetical protein | Spore germination protein GerHB [Bacillus anthracis] | UniRef100_Q81KL2 | Bacillus anthracis |
| 1315 | BLP01259 hypothetical protein | | | |
| 1316 | BLP01260 hypothetical protein | | | |
| 1317 | BLP01261 hypothetical protein | Spore germination protein [Oceanobacillus iheyensis] | UniRef100_Q8CUL1 | Oceanobacillus iheyensis |
| 1318 | BLP01262 hypothetical protein | YisU [Bacillus subtilis] | UniRef100_O06730 | Bacillus subtilis |
| 1319 | yisW putative transciiptional regulator | YisV protein [Bacillus subtilis] | UniRef100_Q796Q6 | Bacillus subtilis |
| 1320 | BLP01265 hypothetical protein | | | |
| 1321 | BLP01266 4-aminobutyrate aminotransferase | Hypothetical protein [Bacillus licheniformis DSM 13] | UniRef100_Q65LH3 | Bacillus licheniformis DSM 13 |
| 1322 | BLP01267 putative L-2,4-diaminobutyrate | Hypothetical protein [Bacillus licheniformis DSM 13] | UniRef100_Q65LH2 | Bacillus licheniformis DSM 13 |
| | decarboxylase | | | |
| 1323 | BLP01268 putative Siderophore biosynthesis protein | Hypothetical protein [Bacillus licheniformis DSM 13] | UniRef100_Q65LH1 | Bacillus licheniformis DSM 13 |
| 1324 | BLP01269 Siderophore biosynthesis protein | Hypothetical protein [Bacillus licheniformis DSM 13] | UniRef100_Q65LH0 | Bacillus licheniformis DSM 13 |
| 1325 | BLP01270 Siderophore biosynthesis protein | Hypothetical protein [Bacillus licheniformis DSM 13] | UniRef100_Q65LG9 | Bacillus licheniformis DSM 13 |
| 1326 | BLP01271 Siderophore biosynthesis protein | Hypothetical protein [Bacillus licheniformis DSM 13] | UniRef100_Q65LG8 | Bacillus licheniformis DSM 13 |
| 1327 | yitI probable acetyltransferase | YitI [Bacillus licheniformis DSM 13] | UniRef100_Q65LG7 | Bacillus licheniformis DSM 13 |
| 1328 | BLP01273 Short-chain dehydrogenase_reductase | Hypothetical protein [Bacillus licheniformis DSM 13] | UniRef100_Q65LG6 | Bacillus licheniformis DSM 13 |
| | SDR | | | |
| 1329 | BLP01274 hypothetical DNA-binding protein | Hypothetical protein [Bacillus licheniformis DSM 13] | UniRef100_Q65LG5 | Bacillus licheniformis DSM 13 |
| 1330 | metH putative 5-methyltetrahydrofolate- | Hypothetical protein (EC 2.1.1.13) (Cobalamin-dependent | UniRef100_Q65LG4 | Bacillus licheniformis DSM 13 |
| | homocysteine methyltransferase MetH | methionine synthase, B12-binding-like, Cobalamin (B12)- | | |
| | | binding) [Bacillus licheniformis DSM 13] | | |
| 1331 | yitJ Homocysteine S-methyltransferase | YitJ [Bacillus licheniformis DSM 13] | UniRef100_Q65LG3 | Bacillus licheniformis DSM 13 |
| 1332 | yitK conserved protein YitK | Hypothetical protein yitK [Bacillus licheniformis DSM 13] | UniRef100_Q65LG2 | Bacillus licheniformis DSM 13 |
| 1333 | yitL Nucleic acid-binding protein YitL | Nucleic acid-binding OB-fold [Bacillus licheniformis DSM 13] | UniRef100_Q62WV2 | Bacillus licheniformis DSM 13 |
| 1334 | BLP01279 hypothetical protein | | | |
| 1335 | BLP01280 hypothetical protein | Hypothetical protein [Bacillus licheniformis DSM 13] | UniRef100_Q65LG0 | Bacillus licheniformis DSM 13 |
| 1336 | yitS conserved protein YitS | YitS [Bacillus licheniformis DSM 13] | UniRef100_Q65LF9 | Bacillus licheniformis DSM 13 |
| 1337 | yitT conserved protein YitT | Hypothetical protein yitT [Bacillus licheniformis DSM 13] | UniRef100_Q65LF8 | Bacillus licheniformis DSM 13 |
| 1338 | ipi intracellular proteinase inhibitor Ipi | Ipi [Bacillus licheniformis DSM 13] | UniRef100_Q65LF7 | Bacillus licheniformis DSM 13 |
| 1339 | guaC GMP reductase | GuaC [Bacillus licheniformis DSM 13] | UniRef100_Q65LF6 | Bacillus licheniformis DSM 13 |
| 1340 | BLP01285 hypothetical protein | Hypothetical protein [Bacillus licheniformis DSM 13] | UniRef100_Q65LF5 | Bacillus licheniformis DSM 13 |
| 1341 | BLP01286 hypothetical protein | Hypothetical protein [Bacillus licheniformis DSM 13] | UniRef100_Q62WU4 | Bacillus licheniformis DSM 13 |
| 1342 | yitU putative hydrolase YitU | YitU [Bacillus licheniformis DSM 13] | UniRef100_Q65LF3 | Bacillus licheniformis DSM 13 |
| 1343 | yitV conserved protein, putative esterase YitV | YitV [Bacillus licheniformis DSM 13] | UniRef100_Q65LF2 | Bacillus licheniformis DSM 13 |
| 1344 | yitW N-6 Adenine-specific DNA methylase YitW | YitW [Bacillus licheniformis DSM 13] | UniRef100_Q65LF1 | Bacillus licheniformis DSM 13 |
| 1345 | BLP01290 hypothetical protein | | | |
| 1346 | argC N-acetylglutamate gamma-semialdehyde | ArgC [Bacillus licheniformis DSM 13] | UniRef100_Q65LF0 | Bacillus licheniformis DSM 13 |
| | dehydrogenase | | | |
| 1347 | argJ ornithine acetyltransferase and amino-acid | ArgJ [Bacillus licheniformis DSM 13] | UniRef100_Q65LE9 | Bacillus licheniformis DSM 13 |
| | acetyltransferase | | | |
| 1348 | argB N-acetylglutamate 5-phosphotransferase | ArgB [Bacillus licheniformis DSM 13] | UniRef100_Q65LE8 | Bacillus licheniformis DSM 13 |
| 1349 | argD N-acetylornithine aminotransferase | ArgD [Bacillus licheniformis DSM 13] | UniRef100_Q65LE7 | Bacillus licheniformis DSM 13 |
| 1350 | carA carbamoyl-phosphate transferase-arginine | CarA [Bacillus licheniformis DSM 13] | UniRef100_Q65LE6 | Bacillus licheniformis DSM 13 |
| | (subunit A) | | | |
| 1351 | carB carbamoyl-phosphate transferase-arginine | CarB [Bacillus licheniformis DSM 13] | UniRef100_Q65LE5 | Bacillus licheniformis DSM 13 |
| | (subunit B) | | | |
| 1352 | argF ornithine carbamoyltransferase | ArgF [Bacillus licheniformis DSM 13] | UniRef100_Q65LE4 | Bacillus licheniformis DSM 13 |
| 1353 | upkA probable undecaprenol kinase UpkA | Hypothetical protein [Bacillus licheniformis DSM 13] | UniRef100_Q65LE3 | Bacillus licheniformis DSM 13 |
| 1354 | yjzC conserved hypothetical protein YjzC | YjzC [Bacillus licheniformis DSM 13] | UniRef100_Q65LE2 | Bacillus licheniformis DSM 13 |
| 1355 | BLP01300 hypothetical protein | | | |
| 1356 | yjaU conserved hypothetical protein YjaU | YjaU [Bacillus licheniformis DSM 13] | UniRef100_Q65LE0 | Bacillus licheniformis DSM 13 |
| 1357 | yjaV conserved hypothetical protein YjaV | YjaV [Bacillus licheniformis DSM 13] | UniRef100_Q65LD9 | Bacillus licheniformis DSM 13 |
| 1358 | med transcriptional activator protein Med | Hypothetical protein med [Bacillus licheniformis DSM 13] | UniRef100_Q65LD8 | Bacillus licheniformis DSM 13 |
| 1359 | comZ ComZ | Hypothetical protein comZ [Bacillus licheniformis DSM 13] | UniRef100_Q62WS7 | Bacillus licheniformis DSM 13 |
| 1360 | yjzB conserved hypothetical protein yjzB | YjzB [Bacillus licheniformis DSM 13] | UniRef100_Q65LD6 | Bacillus licheniformis DSM 13 |
| 1361 | fabHA beta-ketoacyl-acyl carrier protein synthase III | FabHA [Bacillus licheniformis DSM 13] | UniRef100_Q65LD5 | Bacillus licheniformis DSM 13 |
| 1362 | fabF beta-ketoacyl-acyl carrier protein synthase II | FabF [Bacillus licheniformis DSM 13] | UniRef100_Q65LD4 | Bacillus licheniformis DSM 13 |
| 1363 | yjaZ conserved hypothetical protein YjaZ | YjaZ [Bacillus licheniformis DSM 13] | UniRef100_Q65LD3 | Bacillus licheniformis DSM 13 |
| 1364 | appD oligopeptide ABC transporter (ATP-binding | AppD [Bacillus licheniformis DSM 13] | UniRef100_Q65LD2 | Bacillus licheniformis DSM 13 |
| | protein) | | | |
| 1365 | appF oligopeptide ABC transporter (ATP-binding | AppF [Bacillus licheniformis DSM 13] | UniRef100_Q65LD1 | Bacillus licheniformis DSM 13 |
| | protein) | | | |
| 1366 | appA oligopeptide ABC transporter (oligopeptide- | AppA [Bacillus licheniformis DSM 13] | UniRef100_Q65LD0 | Bacillus licheniformis DSM 13 |
| | binding protein) | | | |
| 1367 | appB oligopeptide ABC transporter (permease) | AppB [Bacillus licheniformis DSM 13] | UniRef100_Q65LC9 | Bacillus licheniformis DSM 13 |
| 1368 | appC oligopeptide ABC transporter (permease) | AppC [Bacillus licheniformis DSM 13] | UniRef100_Q65LC8 | Bacillus licheniformis DSM 13 |
| 1369 | BLP01314 Major facilitator superfamily | Hypothetical protein [Bacillus licheniformis DSM 13] | UniRef100_Q65LC7 | Bacillus licheniformis DSM 13 |
| 1370 | BLP01315 hypothetical protein | | | |
| 1371 | yjbA conserved protein YjbA | YjbA [Bacillus licheniformis DSM 13] | UniRef100_Q65LC6 | Bacillus licheniformis DSM 13 |
| 1372 | trpS tryptophanyl-tRNA synthetase | TrpS [Bacillus licheniformis DSM 13] | UniRef100_Q65LC5 | Bacillus licheniformis DSM 13 |
| 1373 | BLP01318 hypothetical protein | | | |
| 1374 | BLP01319 hypothetical protein | | | |
| 1375 | oppA oligopeptide ABC transporter (binding protein) | OppA [Bacillus licheniformis DSM 13] | UniRef100_Q65LC4 | Bacillus licheniformis DSM 13 |
| 1376 | oppB oligopeptide ABC transporter (permease) | OppB [Bacillus licheniformis DSM 13] | UniRef100_Q65LC3 | Bacillus licheniformis DSM 13 |
| 1377 | oppC oligopeptide ABC transporter (permease) | OppC [Bacillus licheniformis DSM 13] | UniRef100_Q65LC2 | Bacillus licheniformis DSM 13 |
| 1378 | oppD oligopeptide ABC transporter (ATP-binding | OppD [Bacillus licheniformis DSM 13] | UniRef100_Q65LC1 | Bacillus licheniformis DSM 13 |
| | protein) | | | |
| 1379 | oppF oligopeptide ABC transporter (ATP-binding | OppF [Bacillus licheniformis DSM 13] | UniRef100_Q65LC0 | Bacillus licheniformis DSM 13 |
| | protein) | | | |
| 1380 | yjbC GCN5-related N-acetyltransferase | YjbC [Bacillus licheniformis DSM 13] | UniRef100_Q65LB9 | Bacillus licheniformis DSM 13 |
| 1381 | spx glutaredoxin family protein Spx | YjbD [Bacillus licheniformis DSM 13] | UniRef100_Q65LB8 | Bacillus licheniformis DSM 13 |
| 1382 | yjbE conserved membrane protein YjbE | Integral membrane protein TerC family [Bacillus licheniformis | UniRef100_Q62WQ7 | Bacillus licheniformis DSM 13 |
| | | DSM 13] | | |
| 1383 | mecA Adaptor protein MecA | Hypothetical protein mecA [Bacillus licheniformis DSM 13] | UniRef100_Q65LB7 | Bacillus licheniformis DSM 13 |
| 1384 | BLP01329 conserved hypothetical protein | Hypothetical protein [Bacillus licheniformis DSM 13] | UniRef100_Q65LB6 | Bacillus licheniformis DSM 13 |
| 1385 | BLP01330 conserved hypothetical protein | Hypothetical protein [Bacillus licheniformis DSM 13] | UniRef100_Q65LB5 | Bacillus licheniformis DSM 13 |
| 1386 | BLP01331 conserved hypothetical protein | Hypothetical protein [Bacillus licheniformis DSM 13] | UniRef100_Q65LB4 | Bacillus licheniformis DSM 13 |
| 1387 | BLP01332 two-component response regulator | Hypothetical protein [Bacillus licheniformis DSM 13] | UniRef100_Q65LB3 | Bacillus licheniformis DSM 13 |
| 1388 | BLP01333 two-component sensor kinase | Hypothetical protein [Bacillus licheniformis DSM 13] | UniRef100_Q65LB2 | Bacillus licheniformis DSM 13 |
| 1389 | yjbF conserved protein YjbF | YjbF [Bacillus licheniformis DSM 13] | UniRef100_Q65LB1 | Bacillus licheniformis DSM 13 |
| 1390 | yjbG oligoendopeptidase F, Pz peptidase | YjbG [Bacillus licheniformis DSM 13] | UniRef100_Q65LB0 | Bacillus licheniformis DSM 13 |
| 1391 | BLP01336 hypothetical protein | Hypothetical protein [Bacillus licheniformis DSM 13] | UniRef100_Q65LA9 | Bacillus licheniformis DSM 13 |
| 1392 | yjbH conserved protein YjbH | Hypothetical protein yjbH [Bacillus licheniformis DSM 13] | UniRef100_Q65LA8 | Bacillus licheniformis DSM 13 |
| 1393 | yjbI truncated form of bacterial hemoglobin YjbI | YjbI [Bacillus licheniformis DSM 13] | UniRef100_Q65LA7 | Bacillus licheniformis DSM 13 |
| 1394 | BLP01339 hypothetical protein | YjbJ [Bacillus licheniformis DSM 13] | UniRef100_Q65LA6 | Bacillus licheniformis DSM 13 |
| 1395 | yjbK conserved protein YjbK | YjbK [Bacillus licheniformis DSM 13] | UniRef100_Q65LA5 | Bacillus licheniformis DSM 13 |
| 1396 | yjbL conserved protein YjbL | Hypothetical protein yjbL [Bacillus licheniformis DSM 13] | UniRef100_Q65LA4 | Bacillus licheniformis DSM 13 |
| 1397 | yjbM conserved protein YjbM | YjbM [Bacillus licheniformis DSM 13] | UniRef100_Q65LA3 | Bacillus licheniformis DSM 13 |
| 1398 | ppnK1 probable inorganic polyphosphate_ATP-NAD | YjbN [Bacillus licheniformis DSM 13] | UniRef100_Q65LA2 | Bacillus licheniformis DSM 13 |
| | kinase | | | |
| 1399 | yjbO Pseudouridine synthase YjbO | Pseudouridine synthase, RluD [Bacillus licheniformis DSM 13] | UniRef100_Q62WP0 | Bacillus licheniformis DSM 13 |
| 1400 | yjbP Ser_Thr protein phosphatase YjbP | YjbP [Bacillus licheniformis DSM 13] | UniRef100_Q65LA0 | Bacillus licheniformis DSM 13 |
| 1401 | BLP04717 hypothetical protein | | | |
| 1402 | yjbQ cation transporter YjbQ | YjbQ [Bacillus licheniformis DSM 13] | UniRef100_Q65L99 | Bacillus licheniformis DSM 13 |
| 1403 | tenA transcriptional regulator | TenA [Bacillus licheniformis DSM 13] | UniRef100_Q65L98 | Bacillus licheniformis DSM 13 |
| 1404 | tenI transcriptional regulator | TenI [Bacillus licheniformis DSM 13] | UniRef100_Q65L97 | Bacillus licheniformis DSM 13 |
| 1405 | goxB glycine oxidase | GoxB [Bacillus licheniformis DSM 13] | UniRef100_Q65L96 | Bacillus licheniformis DSM 13 |
| 1406 | thiS ThiS | Hypothetical protein thiS [Bacillus licheniformis DSM 13] | UniRef100_Q65L95 | Bacillus licheniformis DSM 13 |
| 1407 | thiG ThiG | Hypothetical protein thiG [Bacillus licheniformis DSM 13] | UniRef100_Q65L94 | Bacillus licheniformis DSM 13 |
| 1408 | thiF ThiF | Hypothetical protein thiF [Bacillus licheniformis DSM 13] | UniRef100_Q65L93 | Bacillus licheniformis DSM 13 |
| 1409 | thiDA Phosphomethylpyrimidine kinase | YjbV [Bacillus licheniformis DSM 13] | UniRef100_Q65L92 | Bacillus licheniformis DSM 13 |
| 1410 | fabI enoyl-acyl carrier protein reductase | FabI [Bacillus licheniformis DSM 13] | UniRef100_Q65L91 | Bacillus licheniformis DSM 13 |
| 1411 | BLP01355 hypothetical protein | | | |
| 1412 | cotO CotO | Hypothetical protein yjbX [Bacillus licheniformis DSM 13] | UniRef100_Q65L90 | Bacillus licheniformis DSM 13 |
| 1413 | cotZ spore coat protein (insoluble fraction) | CotZ [Bacillus licheniformis DSM 13] | UniRef100_Q65L89 | Bacillus licheniformis DSM 13 |
| 1414 | cotY spore coat protein (insoluble fraction) | CotY [Bacillus licheniformis DSM 13] | UniRef100_Q65L88 | Bacillus licheniformis DSM 13 |
| 1415 | cotX spore coat protein (insoluble fraction) | Spore coat protein [Bacillus licheniformis DSM 13] | UniRef100_Q62WM6 | Bacillus licheniformis DSM 13 |
| 1416 | cotW spore coat protein (insoluble fraction) | Hypothetical protein [Bacillus licheniformis DSM 13] | UniRef100_Q65L86 | Bacillus licheniformis DSM 13 |
| 1417 | cotV spore coat protein (insoluble fraction) | Spore coat protein [Bacillus licheniformis DSM 13] | UniRef100_Q62WM4 | Bacillus licheniformis DSM 13 |
| 1418 | yjcA YjcA | Hypothetical protein yjcA [Bacillus licheniformis DSM 13] | UniRef100_Q62WM3 | Bacillus licheniformis DSM 13 |
| 1419 | BLP04718 hypothetical protein | Hypothetical protein [Bacillus licheniformis DSM 13] | UniRef100_Q65L84 | Bacillus licheniformis DSM 13 |
| 1420 | BLP01364 hypothetical protein | Hypothetical protein [Bacillus licheniformis DSM 13] | UniRef100_Q62WM2 | Bacillus licheniformis DSM 13 |
| 1421 | BLP01365 hypothetical protein | | | |
| 1422 | yjcC YjcC | Hypothetical protein yjcC [Bacillus licheniformis DSM 13] | UniRef100_Q65L82 | Bacillus licheniformis DSM 13 |
| 1423 | yjcD putative ATP-dependent DNA helicase YjcD | YjcD [Bacillus licheniformis DSM 13] | UniRef100_Q65L81 | Bacillus licheniformis DSM 13 |
| 1424 | BLP01368 hypothetical protein | | | |
| 1425 | yngC conserved membrane protein YngC | YngC [Bacillus licheniformis DSM 13] | UniRef100_Q65L79 | Bacillus licheniformis DSM 13 |
| 1426 | BLP01370 putative UDP-glucose 4-epimerase | Hypothetical protein [Bacillus licheniformis DSM 13] | UniRef100_Q65L78 | Bacillus licheniformis DSM 13 |
| 1427 | yngB UTP--glucose-1-phosphate uridylyltransferase | YngB [Bacillus licheniformis DSM 13] | UniRef100_Q65L77 | Bacillus licheniformis DSM 13 |
| | YngB | | | |
| 1428 | yngA conserved membrane protein YngA | YngA [Bacillus licheniformis DSM 13] | UniRef100_Q65L76 | Bacillus licheniformis DSM 13 |
| 1429 | yjcF probable acetyltransferase YjcF | YjcF [Bacillus licheniformis DSM 13] | UniRef100_Q65L75 | Bacillus licheniformis DSM 13 |
| 1430 | yjcG conserved protein YjcG | YjcG [Bacillus licheniformis DSM 13] | UniRef100_Q65L74 | Bacillus licheniformis DSM 13 |
| 1431 | yjcH conserved protein, putative carbohydrate | YjcH [Bacillus licheniformis DSM 13] | UniRef100_Q65L73 | Bacillus licheniformis DSM 13 |
| | esterase family 1, YjcH | | | |
| 1432 | BLP04816 conserved hypothetical protein | Hypothetical protein [Bacillus licheniformis DSM 13] | UniRef100_Q65L72 | Bacillus licheniformis DSM 13 |
| 1433 | BLP01376 hypothetical protein | | | |
| 1434 | BLP01377 conserved hypothetical protein | Hypothetical protein [Bacillus licheniformis DSM 13] | UniRef100_Q65L71 | Bacillus licheniformis DSM 13 |
| 1435 | BLP01378 hypothetical DNA-binding protein | Hypothetical protein [Bacillus licheniformis DSM 13] | UniRef100_Q65L70 | Bacillus licheniformis DSM 13 |
| 1436 | yjcI Cys_Met metabolism pyridoxal-phosphate- | YjcI [Bacillus licheniformis DSM 13] | UniRef100_Q65L69 | Bacillus licheniformis DSM 13 |
| | dependent enzymes | | | |
| 1437 | yjcJ putative Cystathionine beta-lyase | YjcJ [Bacillus licheniformis DSM 13] | UniRef100_Q65L68 | Bacillus licheniformis DSM 13 |
| 1438 | yjcL conserved membrane protein YjcL | Hypothetical protein yjcL [Bacillus licheniformis DSM 13] | UniRef100_Q65L67 | Bacillus licheniformis DSM 13 |
| 1439 | BLP01382 hypothetical DNA-binding protein, putative | Hypothetical protein [Bacillus licheniformis DSM 13] | UniRef100_Q65L66 | Bacillus licheniformis DSM 13 |
| | transcriptional regulator | | | |
| 1440 | BLP01383 conserved hypothetical protein | Hypothetical protein [Bacillus licheniformis DSM 13] | UniRef100_Q65L65 | Bacillus licheniformis DSM 13 |
| 1441 | pbpE penicillin-binding protein 4 | PbpE [Bacillus licheniformis DSM 13] | UniRef100_Q65L64 | Bacillus licheniformis DSM 13 |
| 1442 | BLP04719 hypothetical protein | | | |
| 1443 | abnA Glycoside Hydrolase Family 43 | AbnA [Bacillus licheniformis DSM 13] | UniRef100_Q65L63 | Bacillus licheniformis DSM 13 |
| 1444 | BLP01386 hypothetical protein | Hypothetical protein [Bacillus licheniformis DSM 13] | UniRef100_Q65L62 | Bacillus licheniformis DSM 13 |
| 1445 | maa maltose O-acetyltransferase | Maa [Bacillus licheniformis DSM 13] | UniRef100_Q65L61 | Bacillus licheniformis DSM 13 |
| 1446 | BLP01388 hypothetical protein | Hypothetical protein [Bacillus licheniformis DSM 13] | UniRef100_Q65L60 | Bacillus licheniformis DSM 13 |
| 1447 | cisLA transcriptional activator of the cysJI operon | YwfK [Bacillus licheniformis DSM 13] | UniRef100_Q65L59 | Bacillus licheniformis DSM 13 |
| 1448 | BLP01390 hypothetical protein | | | |
| 1449 | cysI sulfite reductase (NADPH) flavoprotein alpha- | YvgR [Bacillus licheniformis DSM 13] | UniRef100_Q65L58 | Bacillus licheniformis DSM 13 |
| | component CysI | | | |
| 1450 | cysJ sulfite reductase (NADPH) hemoprotein beta- | YvgQ [Bacillus licheniformis DSM 13] | UniRef100_Q65L57 | Bacillus licheniformis DSM 13 |
| | component CysJ | | | |
| 1451 | BLP01393 hypothetical protein | Putative HTH-type transcriptional regulator yoaU [Bacillus | UniRef100_O34701 | Bacillus subtilis |
| | | subtilis] | | |
| 1452 | yoaV conserved membrane protein YoaV | Hypothetical protein yoaV [Bacillus licheniformis DSM 13] | UniRef100_Q65L54 | Bacillus licheniformis DSM 13 |
| 1453 | yyaH putative Glyoxalase family protein | YyaH [Bacillus licheniformis DSM 13] | UniRef100_Q65L53 | Bacillus licheniformis DSM 13 |
| 1454 | yoeB conserved hypothetical protein YoeB | YoeB [Bacillus licheniformis DSM 13] | UniRef100_Q65L52 | Bacillus licheniformis DSM 13 |
| 1455 | BLP04720 hypothetical protein | | | |
| 1456 | yocH Peptidoglycan-binding protein | Hypothetical protein [Bacillus licheniformis DSM 13] | UniRef100_Q65L51 | Bacillus licheniformis DSM 13 |
| 1457 | BLP01398 putative transporter, drug-export protein | Hypothetical protein [Bacillus licheniformis DSM 13] | UniRef100_Q65L50 | Bacillus licheniformis DSM 13 |
| 1458 | yxaF putative transscriptional regulator HTH type | YxaF [Bacillus licheniformis DSM 13] | UniRef100_Q65L49 | Bacillus licheniformis DSM 13 |
| | YxaF | | | |
| 1459 | BLP01400 hypothetical protein | Hypothetical protein [Bacillus licheniformis DSM 13] | UniRef100_Q65L48 | Bacillus licheniformis DSM 13 |
| 1460 | BLP01401 hypothetical protein | Hypothetical protein [Bacillus licheniformis DSM 13] | UniRef100_Q65L47 | Bacillus licheniformis DSM 13 |
| 1461 | BLP01402 putative transposase | YeeF [Bacillus licheniformis DSM 13] | UniRef100_Q65L45 | Bacillus licheniformis DSM 13 |
| 1462 | yjqB hypothetical protein | YjqB [Bacillus licheniformis DSM 13] | UniRef100_Q65L44 | Bacillus licheniformis DSM 13 |
| 1463 | xkdA phage related gene | Hypothetical protein xkDa [Bacillus licheniformis DSM 13] | UniRef100_Q65L43 | Bacillus licheniformis DSM 13 |
| 1464 | xre transcriptional regulator | Xre [Bacillus licheniformis DSM 13] | UniRef100_Q65L42 | Bacillus licheniformis DSM 13 |
| 1465 | BLP04817 conserved hypothetical protein | Hypothetical protein [Bacillus licheniformis DSM 13] | UniRef100_Q65L41 | Bacillus licheniformis DSM 13 |
| 1466 | BLP01406 hypothetical protein | | | |
| 1467 | BLP01407 hypothetical protein | Hypothetical protein [Bacillus licheniformis DSM 13] | UniRef100_Q65L40 | Bacillus licheniformis DSM 13 |
| 1468 | xkdB phage related protein | Hypothetical protein xkdB [Bacillus licheniformis DSM 13] | UniRef100_Q65L39 | Bacillus licheniformis DSM 13 |
| 1469 | xkdC phage related protein | Hypothetical protein xkdC [Bacillus licheniformis DSM 13] | UniRef100_Q65L38 | Bacillus licheniformis DSM 13 |
| 1470 | BLP01410 conserved hypothetical | Hypothetical protein [Bacillus licheniformis DSM 13] | UniRef100_Q65L37 | Bacillus licheniformis DSM 13 |
| 1471 | xkdD phage related protein | Hypothetical protein xkdD [Bacillus licheniformis DSM 13] | UniRef100_Q65L36 | Bacillus licheniformis DSM 13 |
| 1472 | xtrA phage related protein | Hypothetical protein xtrA [Bacillus licheniformis DSM 13] | UniRef100_Q65L35 | Bacillus licheniformis DSM 13 |
| 1473 | xpf putative phage RNA polymerase sigma factor-like | Xpf [Bacillus licheniformis DSM 13] | UniRef100_Q65L34 | Bacillus licheniformis DSM 13 |
| | protein | | | |
| 1474 | xtmA putative phage terminase (small subunit) | XtmA [Bacillus licheniformis DSM 13] | UniRef100_Q65L33 | Bacillus licheniformis DSM 13 |
| 1475 | xtmB putative phage terminase (large subunit) | XtmB [Bacillus licheniformis DSM 13] | UniRef100_Q65L32 | Bacillus licheniformis DSM 13 |
| 1476 | xkdE phage related protein | Hypothetical protein xkdE [Bacillus licheniformis DSM 13] | UniRef100_Q65L31 | Bacillus licheniformis DSM 13 |
| 1477 | xkdF phage related protein | Hypothetical protein xkdF [Bacillus licheniformis DSM 13] | UniRef100_Q65L30 | Bacillus licheniformis DSM 13 |
| 1478 | xkdG phage related protein | Hypothetical protein xkdG [Bacillus licheniformis DSM 13] | UniRef100_Q65L29 | Bacillus licheniformis DSM 13 |
| 1479 | yqbG hypothetical phage related protein YqbG | YqbG [Bacillus licheniformis DSM 13] | UniRef100_Q65L28 | Bacillus licheniformis DSM 13 |
| 1480 | xkdH phage related protein XkdH | YqbH [Bacillus licheniformis DSM 13] | UniRef100_Q65L27 | Bacillus licheniformis DSM 13 |
| 1481 | xkdI hypothetical phage related protein | Hypothetical protein xkdI [Bacillus licheniformis DSM 13] | UniRef100_Q65L26 | Bacillus licheniformis DSM 13 |
| 1482 | xkdJ phage related protein | Hypothetical protein xkdJ [Bacillus licheniformis DSM 13] | UniRef100_Q65L25 | Bacillus licheniformis DSM 13 |
| 1483 | BLP01423 conserved hypothetical protein | Hypothetical protein [Bacillus licheniformis DSM 13] | UniRef100_Q65L24 | Bacillus licheniformis DSM 13 |
| 1484 | xkdK hypothetical phage related protein | Hypothetical protein xkdK [Bacillus licheniformis DSM 13] | UniRef100_Q65L23 | Bacillus licheniformis DSM 13 |
| 1485 | xkdM hypothetical phage related protein | Hypothetical protein xkdM [Bacillus licheniformis DSM 13] | UniRef100_Q65L22 | Bacillus licheniformis DSM 13 |
| 1486 | xkdN phage related protein XkdN | XkdN1 [Bacillus licheniformis DSM 13] | UniRef100_Q65L21 | Bacillus licheniformis DSM 13 |
| 1487 | xkdO hypothetical phage related protein | Hypothetical protein xkdO [Bacillus licheniformis DSM 13] | UniRef100_Q65L19 | Bacillus licheniformis DSM 13 |
| 1488 | xkdP hypothetical phage related protein | XkdP [Bacillus licheniformis DSM 13] | UniRef100_Q65L18 | Bacillus licheniformis DSM 13 |
| 1489 | xkdQ hypothetical phage related protein | YqbQ [Bacillus licheniformis DSM 13] | UniRef100_Q65L17 | Bacillus licheniformis DSM 13 |
| 1490 | xkdR hypothetical phage related protein | Hypothetical protein [Bacillus licheniformis DSM 13] | UniRef100_Q65L16 | Bacillus licheniformis DSM 13 |
| 1491 | xkdS hypothetical phage related protein | Hypothetical protein xkdS [Bacillus licheniformis DSM 13] | UniRef100_Q65L15 | Bacillus licheniformis DSM 13 |
| 1492 | xkdT hypothetical phage related protein | YqbT [Bacillus licheniformis DSM 13] | UniRef100_Q65L14 | Bacillus licheniformis DSM 13 |
| 1493 | xkdU hypothetical phage related protein | Hypothetical protein xkdU [Bacillus licheniformis DSM 13] | UniRef100_Q65L13 | Bacillus licheniformis DSM 13 |
| 1494 | BLP01435 hypothetical phage related protein | Hypothetical protein [Bacillus licheniformis DSM 13] | UniRef100_Q65L12 | Bacillus licheniformis DSM 13 |
| 1495 | xkdV hypothetical phage related protein | Hypothetical protein [Bacillus licheniformis DSM 13] | UniRef100_Q65L10 | Bacillus licheniformis DSM 13 |
| 1496 | xkdW phage related protein XkdW | YomQ [Bacillus licheniformis DSM 13] | UniRef100_Q65EU0 | Bacillus licheniformis DSM 13 |
| 1497 | xkdX phage related protein XkdX | YomP [Bacillus licheniformis DSM 13] | UniRef100_Q65KE9 | Bacillus licheniformis DSM 13 |
| 1498 | BLP01440 hypothetical phage related protein | Hypothetical protein xkdV [Bacillus licheniformis DSM 13] | UniRef100_Q65L11 | Bacillus licheniformis DSM 13 |
| 1499 | xhlA phage related protein | XpaL1 homologous protein [Bacillus licheniformis] | UniRef100_P70924 | Bacillus licheniformis |
| 1500 | xpaL2 holin | XpaL2 homologous protein [Bacillus licheniformis] | UniRef100_P70925 | Bacillus licheniformis |
| 1501 | BLP01443 hypothetical protein | ORF [Bacillus licheniformis] | UniRef100_P70926 | Bacillus licheniformis |
| 1502 | cwlL N-acetylmuramoyl-L-alanine amidase | Hypothetical protein [Bacillus licheniformis DSM 13] | UniRef100_Q65L07 | Bacillus licheniformis DSM 13 |
| 1503 | BLP01445 hypothetical DNA-binding protein, putative | Hypothetical protein L4 [Bacillus licheniformis] | UniRef100_Q65L06 | Bacillus licheniformis |
| | transcriptional regulator | | | |
| 1504 | yjmD Zinc-containing alcohol dehydrogenase YjmD | YjmD [Bacillus licheniformis DSM 13] | UniRef100_Q65L05 | Bacillus licheniformis DSM 13 |
| 1505 | uxuA D-mannonate hydrolase | UxuA [Bacillus licheniformis DSM 13] | UniRef100_Q65L04 | Bacillus licheniformis DSM 13 |
| 1506 | yjmF Short-chain dehydrogenase_reductase YjmF | YjmF [Bacillus licheniformis DSM 13] | UniRef100_Q65L03 | Bacillus licheniformis DSM 13 |
| 1507 | BLP01449 putative Zn binding dehydrogenase | Hypothetical protein [Bacillus licheniformis DSM 13] | UniRef100_Q65L02 | Bacillus licheniformis DSM 13 |
| 1508 | exuT hexuronate transporter | ExuT [Bacillus licheniformis DSM 13] | UniRef100_Q65L01 | Bacillus licheniformis DSM 13 |
| 1509 | BLP01451 hypothetical protein | | | |
| 1510 | spoIISB Stage II sporulation protein SB SpoIISB | Hypothetical protein spoIISB [Bacillus licheniformis DSM 13] | UniRef100_Q65L00 | Bacillus licheniformis DSM 13 |
| 1511 | spoIISA Stage II sporulation protein SA SpoIISA | Hypothetical protein spoIISA [Bacillus licheniformis DSM 13] | UniRef100_Q65KZ9 | Bacillus licheniformis DSM 13 |
| 1512 | pit low-affinity inorganic phosphate transporter | Pit [Bacillus licheniformis DSM 13] | UniRef100_Q65KZ8 | Bacillus licheniformis DSM 13 |
| 1513 | ykaA putative gamma glutamyl tranferase YkaA | YkaA [Bacillus licheniformis DSM 13] | UniRef100_Q65KZ7 | Bacillus licheniformis DSM 13 |
| 1514 | ggt gamma-glutamyltranspeptidase | Ggt [Bacillus licheniformis DSM 13] | UniRef100_Q65KZ6 | Bacillus licheniformis DSM 13 |
| 1515 | yesL conserved membrane protein YesL | Hypothetical protein yesL [Bacillus licheniformis DSM 13] | UniRef100_Q65KZ5 | Bacillus licheniformis DSM 13 |
| 1516 | yesM two-component sensor histidine kinase YesM | YesM [Bacillus licheniformis DSM 13] | UniRef100_Q65KZ4 | Bacillus licheniformis DSM 13 |
| 1517 | yesN two-component response regulator YesN | YesN [Bacillus licheniformis DSM 13] | UniRef100_Q65KZ3 | Bacillus licheniformis DSM 13 |
| 1518 | yesO putative transport system substrate-binding | YesO [Bacillus licheniformis DSM 13] | UniRef100_Q65KZ2 | Bacillus licheniformis DSM 13 |
| | protein YesO | | | |
| 1519 | yesP putatice transporter permease protein YesP | YesP [Bacillus licheniformis DSM 13] | UniRef100_Q65KZ1 | Bacillus licheniformis DSM 13 |
| 1520 | yesQ probable transporter permease protein YesQ | YesQ [Bacillus licheniformis DSM 13] | UniRef100_Q65KZ0 | Bacillus licheniformis DSM 13 |
| 1521 | yesR conserved protein YesR | YesR [Bacillus licheniformis DSM 13] | UniRef100_Q65KY9 | Bacillus licheniformis DSM 13 |
| 1522 | yesS probable transcriptional regulator | YesS [Bacillus licheniformis DSM 13] | UniRef100_Q65KY8 | Bacillus licheniformis DSM 13 |
| 1523 | yesT putative carbohydrate esterase, Family 12, YesT | YesT [Bacillus licheniformis DSM 13] | UniRef100_Q65KY7 | Bacillus licheniformis DSM 13 |
| 1524 | yesU YesU | YesU [Bacillus licheniformis DSM 13] | UniRef100_Q65KY6 | Bacillus licheniformis DSM 13 |
| 1525 | yesV conserved membrane protein YesV | Hypothetical protein yesV [Bacillus licheniformis DSM 13] | UniRef100_Q65KY5 | Bacillus licheniformis DSM 13 |
| 1526 | yesW putative polysaccharide lyase family 11 protein | YesW [Bacillus licheniformis DSM 13] | UniRef100_Q65KY4 | Bacillus licheniformis DSM 13 |
| 1527 | BLP01469 hypothetical protein | | | |
| 1528 | BLP01470 hypothetical protein | Hypothetical protein [Bacillus licheniformis DSM 13] | UniRef100_Q65KY3 | Bacillus licheniformis DSM 13 |
| 1529 | yesT putative carbohydrate esterase Family 12 | Hypothetical protein [Bacillus licheniformis DSM 13] | UniRef100_Q65KY2 | Bacillus licheniformis DSM 13 |
| 1530 | yesX Polysaccharide lyase Family 11 | YesX [Bacillus licheniformis DSM 13] | UniRef100_Q65KY1 | Bacillus licheniformis DSM 13 |
| 1531 | BLP01473 putative oxidoreductase | YccK [Bacillus licheniformis DSM 13] | UniRef100_Q65KY0 | Bacillus licheniformis DSM 13 |
| 1532 | yesY carbohydrate esterase, Family 12 YesY | YesY [Bacillus licheniformis DSM 13] | UniRef100_Q65KX9 | Bacillus licheniformis DSM 13 |
| 1533 | yesZ Glycoside hydrolase, family 42 | YesZ [Bacillus licheniformis DSM 13] | UniRef100_Q65KX8 | Bacillus licheniformis DSM 13 |
| 1534 | yetA conserved hypothetical protein | YetA [Bacillus licheniformis DSM 13] | UniRef100_Q65KX7 | Bacillus licheniformis DSM 13 |
| 1535 | lplA lipoprotein | LplA [Bacillus licheniformis DSM 13] | UniRef100_Q65KX6 | Bacillus licheniformis DSM 13 |
| 1536 | lplB transmembrane lipoprotein | LplB [Bacillus licheniformis DSM 13] | UniRef100_Q65KX5 | Bacillus licheniformis DSM 13 |
| 1537 | lplC transmembrane lipoprotein | LplC [Bacillus licheniformis DSM 13] | UniRef100_Q65KX4 | Bacillus licheniformis DSM 13 |
| 1538 | ykbA putative Amino acid_polyamine permease | YkbA [Bacillus licheniformis DSM 13] | UniRef100_Q65KX3 | Bacillus licheniformis DSM 13 |
| 1539 | BLP01481 hypothetical protein | | | |
| 1540 | yckA2 Glyoxalase_Bleomycin resistance | YkcA [Bacillus licheniformis DSM 13] | UniRef100_Q65KX2 | Bacillus licheniformis DSM 13 |
| | protein_dioxygenase domain superfamily protein | | | |
| | YckA2 | | | |
| 1541 | BLP01483 conserved hypothetical protein | Hypothetical protein [Bacillus licheniformis DSM 13] | UniRef100_Q65KX1 | Bacillus licheniformis DSM 13 |
| 1542 | htrA serine protease HtrA | HtrA [Bacillus licheniformis DSM 13] | UniRef100_Q65KX0 | Bacillus licheniformis DSM 13 |
| 1543 | proG pyrroline-5-carboxylate reductase | ProG [Bacillus licheniformis DSM 13] | UniRef100_Q65KW9 | Bacillus licheniformis DSM 13 |
| 1544 | dppA D-alanyl-aminopeptidase | DppA [Bacillus licheniformis DSM 13] | UniRef100_Q65KW8 | Bacillus licheniformis DSM 13 |
| 1545 | dppB dipeptide ABC transporter (permease) | Dipeptide ABC transporter [Bacillus licheniformis DSM 13] | UniRef100_Q62WB4 | Bacillus licheniformis DSM 13 |
| 1546 | dppC dipeptide ABC transporter (permease) | DppC [Bacillus licheniformis DSM 13] | UniRef100_Q65KW6 | Bacillus licheniformis DSM 13 |
| 1547 | dppD dipeptide ABC transporter (ATP-binding protein) | DppD [Bacillus licheniformis DSM 13] | UniRef100_Q65KW5 | Bacillus licheniformis DSM 13 |
| 1548 | dppE dipeptide ABC transporter (dipeptide-binding | DppE [Bacillus licheniformis DSM 13] | UniRef100_Q65KW4 | Bacillus licheniformis DSM 13 |
| | protein) | | | |
| 1549 | yfkA conserved hypothetical protein YfkA | YkfA [Bacillus licheniformis DSM 13] | UniRef100_Q65KW3 | Bacillus licheniformis DSM 13 |
| 1550 | yfkB putative muconate cycloisomerase YfkB | YkfB [Bacillus licheniformis DSM 13] | UniRef100_Q65KW2 | Bacillus licheniformis DSM 13 |
| 1551 | yfkC putative hydrolase YfkC | YkfC [Bacillus licheniformis DSM 13] | UniRef100_Q65KW1 | Bacillus licheniformis DSM 13 |
| 1552 | ykfD Oligopeptide_dipeptide ABC transporter YkfD | YkfD [Bacillus licheniformis DSM 13] | UniRef100_Q65KW0 | Bacillus licheniformis DSM 13 |
| 1553 | ykgA putative transferase, conserved hypothetical | YkgA [Bacillus licheniformis DSM 13] | UniRef100_Q65KV9 | Bacillus licheniformis DSM 13 |
| | protein YkgA | | | |
| 1554 | ykhA Putative acyl-CoA thioester hydrolase YkhA | YkhA [Bacillus licheniformis DSM 13] | UniRef100_Q65KV8 | Bacillus licheniformis DSM 13 |
| 1555 | ykjA conserved hypothetical protein YkjA | YkjA [Bacillus licheniformis DSM 13] | UniRef100_Q65KV7 | Bacillus licheniformis DSM 13 |
| 1556 | BLP04721 hypothetical protein | | | |
| 1557 | pell pectate lyase family 1, Pell | Pel [Bacillus licheniformis DSM 13] | UniRef100_Q65KV6 | Bacillus licheniformis DSM 13 |
| 1558 | BLP01499 putative transcriptional regulator | Hypothetical protein [Bacillus licheniformis DSM 13] | UniRef100_Q65KV5 | Bacillus licheniformis DSM 13 |
| 1559 | BLP01500 hypothetical protein | Hypothetical protein [Bacillus licheniformis DSM 13] | UniRef100_Q65KV4 | Bacillus licheniformis DSM 13 |
| 1560 | BLP01501 putative DNA binding protein | Hypothetical protein [Bacillus licheniformis DSM 13] | UniRef100_Q65KV3 | Bacillus licheniformis DSM 13 |
| 1561 | ykkA conserved hypothetical protein YkkA | YkkA [Bacillus licheniformis DSM 13] | UniRef100_Q65KV2 | Bacillus licheniformis DSM 13 |
| 1562 | ykkC putative membrane protein, probable transporter | YkkC [Bacillus licheniformis DSM 13] | UniRef100_Q65KV1 | Bacillus licheniformis DSM 13 |
| 1563 | ykkD conserved hypothetical protein YkkD | YkkD [Bacillus licheniformis DSM 13] | UniRef100_Q65KV0 | Bacillus licheniformis DSM 13 |
| 1564 | purU Formyltetrahydrofolate deformylase | YkkE [Bacillus licheniformis DSM 13] | UniRef100_Q65KU9 | Bacillus licheniformis DSM 13 |
| 1565 | BLP01506 hypothetical protein | | | |
| 1566 | proB glutamate 5-kinase ProB | ProB [Bacillus licheniformis DSM 13] | UniRef100_Q65KU8 | Bacillus licheniformis DSM 13 |
| 1567 | proA gamma-glutamyl phosphate reductase ProA | ProA [Bacillus licheniformis DSM 13] | UniRef100_Q65KU7 | Bacillus licheniformis DSM 13 |
| 1568 | ohrA organic hydroperoxide resistance protein OhrA | YklA [Bacillus licheniformis DSM 13] | UniRef100_Q65KU6 | Bacillus licheniformis DSM 13 |
| 1569 | ohrR repressor of ohrA —OhrR | YkmA [Bacillus licheniformis DSM 13] | UniRef100_Q65KU5 | Bacillus licheniformis DSM 13 |
| 1570 | BLP01511 hypothetical protein | | | |
| 1571 | ohrB organic hydroperoxide resistance protein, | YkzA [Bacillus licheniformis DSM 13] | UniRef100_Q65KU4 | Bacillus licheniformis DSM 13 |
| | sigmaB regulon | | | |
| 1572 | BLP01513 hypothetical protein | Hypothetical protein [Bacillus licheniformis DSM 13] | UniRef100_Q65KU3 | Bacillus licheniformis DSM 13 |
| 1573 | guaD guanine deaminase | GuaD [Bacillus licheniformis DSM 13] | UniRef100_Q65KU2 | Bacillus licheniformis DSM 13 |
| 1574 | BLP01515 putative phosphatase | Hypothetical protein [Bacillus licheniformis DSM 13] | UniRef100_Q65KU1 | Bacillus licheniformis DSM 13 |
| 1575 | BLP01516 hypothetical protein | Hypothetical protein [Bacillus licheniformis DSM 13] | UniRef100_Q65KU0 | Bacillus licheniformis DSM 13 |
| 1576 | BLP01517 hypothetical protein | Hypothetical protein [Bacillus licheniformis DSM 13] | UniRef100_Q65KT9 | Bacillus licheniformis DSM 13 |
| 1577 | metE methionine synthase | MetE [Bacillus licheniformis DSM 13] | UniRef100_Q65KT8 | Bacillus licheniformis DSM 13 |
| 1578 | ispA intracellular serine protease | IspA [Bacillus licheniformis DSM 13] | UniRef100_Q65KT7 | Bacillus licheniformis DSM 13 |
| 1579 | ykzD conserved hypothetical protein YkzD | YkzD [Bacillus licheniformis DSM 13] | UniRef100_Q65KT6 | Bacillus licheniformis DSM 13 |
| 1580 | ykoK Divalent cation transporter | YkoK2 [Bacillus licheniformis DSM 13] | UniRef100_Q65KT5 | Bacillus licheniformis DSM 13 |
| 1581 | BLP01522 hypothetical protein | Hypothetical protein [Bacillus licheniformis DSM 13] | UniRef100_Q65KT4 | Bacillus licheniformis DSM 13 |
| 1582 | tnrA transcriptional regulator | TnrA [Bacillus licheniformis DSM 13] | UniRef100_Q65KM3 | Bacillus licheniformis DSM 13 |
| 1583 | ykzB conserved hypothetical protein YkzB | YkzB [Bacillus licheniformis DSM 13] | UniRef100_Q65KM2 | Bacillus licheniformis DSM 13 |
| 1584 | ykoL conserved hypothetical protein YkoL | Hypothetical protein [Bacillus licheniformis DSM 13] | UniRef100_Q62W20 | Bacillus licheniformis DSM 13 |
| 1585 | ykoM hypothetical DNA-binding protein YkoM | YkoM [Bacillus licheniformis DSM 13] | UniRef100_Q65KM0 | Bacillus licheniformis DSM 13 |
| 1586 | ykoU ATP-dependent DNA ligase YkoU | YkoU [Bacillus licheniformis DSM 13] | UniRef100_Q65KL9 | Bacillus licheniformis DSM 13 |
| 1587 | ykoV Cytochrome c heme-binding site protein YkoV | YkoV [Bacillus licheniformis DSM 13] | UniRef100_Q65KL8 | Bacillus licheniformis DSM 13 |
| 1588 | ykoW GGDEF, sensory domain containing protein | YkoW [Bacillus licheniformis DSM 13] | UniRef100_Q65KL7 | Bacillus licheniformis DSM 13 |
| | YkoW | | | |
| 1589 | BLP01530 hypothetical protein | | | |
| 1590 | ykoX DedA family protein YkoX | YkoX [Bacillus licheniformis DSM 13] | UniRef100_Q65KL6 | Bacillus licheniformis DSM 13 |
| 1591 | ykoY Integral membrane protein YkoY | YkoY [Bacillus licheniformis DSM 13] | UniRef100_Q65KL5 | Bacillus licheniformis DSM 13 |
| 1592 | sigI RNA polymerase sigma factor | SigI [Bacillus licheniformis DSM 13] | UniRef100_Q65KL4 | Bacillus licheniformis DSM 13 |
| 1593 | ykrI conserved hypothetical protein YkrI | YkrI [Bacillus licheniformis DSM 13] | UniRef100_Q65KL3 | Bacillus licheniformis DSM 13 |
| 1594 | sspD small acid-soluble spore protein | SspD [Bacillus licheniformis DSM 13] | UniRef100_Q65KL2 | Bacillus licheniformis DSM 13 |
| 1595 | ykrK conserved hypothetical protein YkrK | YkrK [Bacillus licheniformis DSM 13] | UniRef100_Q65KL1 | Bacillus licheniformis DSM 13 |
| 1596 | htpX putative protease_metalloendopeptidase | YkrL [Bacillus licheniformis DSM 13] | UniRef100_Q65KL0 | Bacillus licheniformis DSM 13 |
| 1597 | ktrD Cation transporter | YkrM [Bacillus licheniformis DSM 13] | UniRef100_Q65KK9 | Bacillus licheniformis DSM 13 |
| 1598 | pbpC penicillin-binding protein 3 | PbpC [Bacillus licheniformis DSM 13] | UniRef100_Q65KK8 | Bacillus licheniformis DSM 13 |
| 1599 | BLP01540 conserved hypothetical protein | Hypothetical protein [Bacillus licheniformis DSM 13] | UniRef100_Q65KK7 | Bacillus licheniformis DSM 13 |
| 1600 | ykzE conserved hypothetical protein YkzE | YkzE [Bacillus licheniformis DSM 13] | UniRef100_Q65KK6 | Bacillus licheniformis DSM 13 |
| 1601 | ykrP putative Acyltransferase 3 YkrP | YkrP [Bacillus licheniformis DSM 13] | UniRef100_Q65KK5 | Bacillus licheniformis DSM 13 |
| 1602 | kinE two-component sensor histidine kinase | KinE [Bacillus licheniformis DSM 13] | UniRef100_Q65KK4 | Bacillus licheniformis DSM 13 |
| 1603 | ogt O6-methylguanine DNA alkyltransferase | Ogt [Bacillus licheniformis DSM 13] | UniRef100_Q65KK3 | Bacillus licheniformis DSM 13 |
| 1604 | BLP01545 hypothetical protein | Hypothetical protein [Bacillus licheniformis DSM 13] | UniRef100_Q62W01 | Bacillus licheniformis DSM 13 |
| 1605 | mtnS methylthioribose-1-phosphate isomerase | YkrS [Bacillus licheniformis DSM 13] | UniRef100_Q65KK2 | Bacillus licheniformis DSM 13 |
| 1606 | mtnK methylthioribose kinase | YkrT [Bacillus licheniformis DSM 13] | UniRef100_Q65KK1 | Bacillus licheniformis DSM 13 |
| 1607 | mtnU methylthioribose recycling protein | YkrU [Bacillus licheniformis DSM 13] | UniRef100_Q65KK0 | Bacillus licheniformis DSM 13 |
| 1608 | mtnV Aminotransferase, class I and II | YkrV [Bacillus licheniformis DSM 13] | UniRef100_Q65KJ9 | Bacillus licheniformis DSM 13 |
| 1609 | mtnW 2,3-diketo-5-methylthiopentyl-1-phosphate | YkrW [Bacillus licheniformis DSM 13] | UniRef100_Q65KJ8 | Bacillus licheniformis DSM 13 |
| | enolase | | | |
| 1610 | ykrY putative Methylthioribulose-1-phosphate | YkrY (HAD-superfamily hydrolase, subfamily IB (PSPase- | UniRef100_Q65KJ7 | Bacillus licheniformis DSM 13 |
| | dehydratase YkrY | like), HAD-superfamily subfamily IB hydrolase, hypothetical 1) | | |
| | | [Bacillus licheniformis DSM 13] | | |
| 1611 | mtnZ 1,2-dihydroxy-3-keto-5-methylthiopentene | YkrZ [Bacillus licheniformis DSM 13] | UniRef100_Q65KJ6 | Bacillus licheniformis DSM 13 |
| | dioxygenase | | | |
| 1612 | ykvA conserved hypothetical protein YkvA | YkvA [Bacillus licheniformis DSM 13] | UniRef100_Q65KJ4 | Bacillus licheniformis DSM 13 |
| 1613 | spo0E negative sporulation regulatory phosphatase | Spo0E [Bacillus licheniformis DSM 13] | UniRef100_Q65KJ3 | Bacillus licheniformis DSM 13 |
| 1614 | kinD two-component sensor histidine kinase | KinD [Bacillus licheniformis DSM 13] | UniRef100_Q65KJ2 | Bacillus licheniformis DSM 13 |
| 1615 | ykvE putative DNA-binding protein YkvE | YkvE [Bacillus licheniformis DSM 13] | UniRef100_Q65KJ1 | Bacillus licheniformis DSM 13 |
| 1616 | motB motility protein B | MotB [Bacillus licheniformis DSM 13] | UniRef100_Q65KJ0 | Bacillus licheniformis DSM 13 |
| 1617 | motA motility protein A | MotA [Bacillus licheniformis DSM 13] | UniRef100_Q65KI9 | Bacillus licheniformis DSM 13 |
| 1618 | clpE ATP-dependent Clp protease-like (class III stress | ClpE [Bacillus licheniformis DSM 13] | UniRef100_Q65KI8 | Bacillus licheniformis DSM 13 |
| | gene) ClpE | | | |
| 1619 | BLP01561 hypothetical protein | | | |
| 1620 | ykvI Amino acid_polyamine transporter II YkvI | YkvI [Bacillus licheniformis DSM 13] | UniRef100_Q65KI7 | Bacillus licheniformis DSM 13 |
| 1621 | queC Queuosine (Q) synthesis protein QueC | YkvJ [Bacillus licheniformis DSM 13] | UniRef100_Q65KI6 | Bacillus licheniformis DSM 13 |
| 1622 | queD 6-pyruvoyl tetrahydropterin synthase QueD | YkvK [Bacillus licheniformis DSM 13] | UniRef100_Q65KI5 | Bacillus licheniformis DSM 13 |
| 1623 | queE QueE | YkvL [Bacillus licheniformis DSM 13] | UniRef100_Q65KI4 | Bacillus licheniformis DSM 13 |
| 1624 | queF Queuosine biosynthesis protein QueF | YkvM [Bacillus licheniformis DSM 13] | UniRef100_Q65KI3 | Bacillus licheniformis DSM 13 |
| 1625 | BLP01567 putative Lambda integrase-like protein | Hypothetical protein [Bacillus licheniformis DSM 13] | UniRef100_Q65KI2 | Bacillus licheniformis DSM 13 |
| 1626 | BLP01568 putative integrase_recombinase | Hypothetical protein [Bacillus licheniformis DSM 13] | UniRef100_Q65KI1 | Bacillus licheniformis DSM 13 |
| 1627 | BLP01569 conserved hyopothetical protein | Hypothetical protein [Bacillus licheniformis DSM 13] | UniRef100_Q65KH9 | Bacillus licheniformis DSM 13 |
| 1628 | BLP01570 conserved hypothetical protein | Hypothetical protein [Bacillus licheniformis DSM 13] | UniRef100_Q65KH8 | Bacillus licheniformis DSM 13 |
| 1629 | BLP01571 conserved hypothetical protein | Hypothetical protein [Bacillus licheniformis DSM 13] | UniRef100_Q65KC9 | Bacillus licheniformis DSM 13 |
| 1630 | BLP04818 conserved hypothetical protein | Hypothetical protein [Bacillus licheniformis DSM 13] | UniRef100_Q65KH6 | Bacillus licheniformis DSM 13 |
| 1631 | BLP01572 hypothetical protein | | | |
| 1632 | BLP01573 conserved hypothetical protein | Hypothetical protein [Bacillus licheniformis DSM 13] | UniRef100_Q62VX4 | Bacillus licheniformis DSM 13 |
| 1633 | BLP01574 hypothetical protein | Hypothetical protein [Bacillus licheniformis DSM 13] | UniRef100_Q65KH3 | Bacillus licheniformis DSM 13 |
| 1634 | BLP01575 hypothetical protein | | | |
| 1635 | BLP01576 hypothetical protein | | | |
| 1636 | BLP04851 conserved hypothetical protein | | | |
| 1637 | BLP01577 putative transposase | Hypothetical protein [Bacillus licheniformis DSM 13] | UniRef100_Q65EU5 | Bacillus licheniformis DSM 13 |
| 1638 | BLP04852 hypothetical protein | | | |
| 1639 | BLP01578 hypothetical protein | | | |
| 1640 | BLP04853 hypothetical protein | | | |
| 1641 | BLP04722 hypothetical protein | | | |
| 1642 | BLP01579 hypothetical protein | | | |
| 1643 | BLP04854 hypothetical protein | | | |
| 1644 | BLP04855 hypothetical protein | | | |
| 1645 | BLP04724 hypothetical protein | BH0955 protein [Bacillus halodurans] | UniRef100_Q9KEA1 | Bacillus halodurans |
| 1646 | BLP01580 hypothetical protein | | | |
| 1647 | BLP01581 hypothetical protein | | | |
| 1648 | BLP01582 conserved hypothetical protein | Hypothetical protein [Bacillus licheniformis DSM 13] | UniRef100_Q65KG9 | Bacillus licheniformis DSM 13 |
| 1649 | BLP04856 hypothetical protein | | | |
| 1650 | BLP01583 hypothetical protein | | | |
| 1651 | BLP01584 hypothetical protein | Hypothetical protein CTC01098 [Clostridium tetani] | UniRef100_Q896B0 | Clostridium tetani |
| 1652 | BLP04857 hypothetical protein | | | |
| 1653 | BLP01585 hypothetical protein | | | |
| 1654 | BLP01586 hypothetical protein | | | |
| 1655 | BLP04725 hypothetical protein | | | |
| 1656 | BLP01587 phage related, putative terminase large | Prophage LambdaBa02, terminase, large subunit, putative | UniRef100_Q81W88 | Bacillus anthracis |
| | sub-unit | [Bacillus anthracis] | | |
| 1657 | BLP01589 integrase like protein | | | |
| 1658 | BLP01590 phage protein | Phage protein [Bacillus cereus] | UniRef100_Q81ES3 | Bacillus cereus |
| 1659 | BLP01591 phage protein | Phage protein [Bacillus cereus] | UniRef100_Q81ES4 | Bacillus cereus |
| 1660 | BLP01592 phage portal like protein | | | |
| 1661 | BLP01593 phage head protein | Lin2392 protein [Listeria innocua] | UniRef100_Q928Y8 | Listeria innocua |
| 1662 | BLP01594 phage protein | | | |
| 1663 | BLP01595 phage protein minor capsid-like | | | |
| 1664 | BLP01596 phage protein | Phage protein [Bacillus cereus] | UniRef100_Q81ES0 | Bacillus cereus |
| 1665 | BLP01597 hypothetical protein | | | |
| 1666 | BLP01598 hypothetical protein | | | |
| 1667 | BLP04858 hypothetical protein | | | |
| 1668 | BLP01599 hypothetical protein | | | |
| 1669 | BLP01600 hypothetical protein | | | |
| 1670 | BLP01601 phage protein | ORF36 [Bacteriophage phi-105] | UniRef100_Q9ZXE7 | Bacteriophage phi-105 |
| 1671 | BLP01602 phage related protein | Hypothetical protein [Bacillus licheniformis DSM 13] | UniRef100_Q65KF4 | Bacillus licheniformis DSM 13 |
| 1672 | BLP01603 phage related protein | Hypothetical Phage minor structural protein, N-terminal | UniRef100_Q65KF3 | Bacillus licheniformis DSM 13 |
| | | [Bacillus licheniformis DSM 13] | | |
| 1673 | BLP01605 phage related protein | Hypothetical protein [Bacillus licheniformis DSM 13] | UniRef100_Q65KF2 | Bacillus licheniformis DSM 13 |
| 1674 | BLP01606 phage related protein | PBSX [Bacillus licheniformis DSM 13] | UniRef100_Q65KF1 | Bacillus licheniformis DSM 13 |
| 1675 | BLP01607 hypothetical phage like protein | YomQ [Bacillus licheniformis DSM 13] | UniRef100_Q65EU0 | Bacillus licheniformis DSM 13 |
| 1676 | BLP01608 hypothetical protein | | | |
| 1677 | BLP01609 hypothetical protein | | | |
| 1678 | xlyB N-acetylmuramoyl-L-alanine amidase | N-acetylmuramoyl-L-alanine amidase xlyB precursor [Bacillus | UniRef100_O34391 | Bacillus subtilis |
| | | subtilis] | | |
| 1679 | BLP01611 putative holin phage-like protein | Holin protein [Bacillus halodurans] | UniRef100_Q9KE89 | Bacillus halodurans |
| 1680 | ydcL Lambda integrase-like, N-terminal, DNA | Hypothetical protein [Bacillus licheniformis DSM 13] | UniRef100_Q65KE0 | Bacillus licheniformis DSM 13 |
| | breaking-rejoining enzyme, catalytic core | | | |
| 1681 | BLP01613 hypothetical protein | YkvM protein [Bacillus subtilis] | UniRef100_O31678 | Bacillus subtilis |
| 1682 | BLP01614 hypothetical protein | | | |
| 1683 | rapH Response regulator aspartate phosphatase H | Response regulator aspartate phosphatase H [Bacillus | UniRef100_P40771 | Bacillus subtilis |
| | | subtilis] | | |
| 1684 | BLP01616 hypothetical protein | | | |
| 1685 | yoaT conserved membrane protein YoaT | Hypothetical protein yoaT [Bacillus licheniformis DSM 13] | UniRef100_Q65KD5 | Bacillus licheniformis DSM 13 |
| 1686 | yozG probable transcriptional regulator YozG | YozG [Bacillus licheniformis DSM 13] | UniRef100_Q65KD4 | Bacillus licheniformis DSM 13 |
| 1687 | yoaS YoaS | Hypothetical protein yoaS [Bacillus licheniformis DSM 13] | UniRef100_Q65KD3 | Bacillus licheniformis DSM 13 |
| 1688 | BLP04726 hypothetical protein | | | |
| 1689 | BLP01620 hypothetical protein | Hypothetical protein [Bacillus licheniformis DSM 13] | UniRef100_Q65KD2 | Bacillus licheniformis DSM 13 |
| 1690 | BLP01621 hypothetical protein | Hypothetical protein [Bacillus licheniformis DSM 13] | UniRef100_Q65KD0 | Bacillus licheniformis DSM 13 |
| 1691 | BLP01622 hypothetical protein | Hypothetical protein [Bacillus licheniformis DSM 13] | UniRef100_Q65KC9 | Bacillus licheniformis DSM 13 |
| 1692 | BLP01623 hypothetical protein | | | |
| 1693 | BLP01624 hypothetical protein | Hypothetical protein [Bacillus licheniformis DSM 13] | UniRef100_Q65KC8 | Bacillus licheniformis DSM 13 |
| 1694 | BLP01625 hypothetical protein | | | |
| 1695 | ykvS conserved hypothetical protein YkvS | Hypothetical protein [Bacillus licheniformis DSM 13] | UniRef100_Q65KC7 | Bacillus licheniformis DSM 13 |
| 1696 | BLP01627 hypothetical protein | Hypothetical protein [Bacillus licheniformis DSM 13] | UniRef100_Q65KC6 | Bacillus licheniformis DSM 13 |
| 1697 | BLP01628 hypothetical protein | | | |
| 1698 | ykvT putative Cell wall hydrolase YkvT | YkvT [Bacillus licheniformis DSM 13] | UniRef100_Q65KC5 | Bacillus licheniformis DSM 13 |
| 1699 | ykvU Polysaccharide biosynthesis protein YkvU | YkvU [Bacillus licheniformis DSM 13] | UniRef100_Q65KC4 | Bacillus licheniformis DSM 13 |
| 1700 | ykvV Thioredoxin type domain, electron transporter | YkvV [Bacillus licheniformis DSM 13] | UniRef100_Q65KC3 | Bacillus licheniformis DSM 13 |
| | protein YkvV | | | |
| 1701 | zosA Heavy metal-(Cd_Co_Hg_Pb_Zn)-translocating | YkvW [Bacillus licheniformis DSM 13] | UniRef100_Q65KC2 | Bacillus licheniformis DSM 13 |
| | P-type ATPase-ZosA | | | |
| 1702 | ykvY Peptidase M24, putative metallopetidase YkvY | YkvY [Bacillus licheniformis DSM 13] | UniRef100_Q65KC1 | Bacillus licheniformis DSM 13 |
| 1703 | BLP01634 hypothetical protein | | | |
| 1704 | BLP01635 hypothetical protein | | | |
| 1705 | BLP01636 conserved hypothetical protein | Hypothetical Necrosis inducing [Bacillus licheniformis DSM | UniRef100_Q62VS2 | Bacillus licheniformis DSM 13 |
| | | 13] | | |
| 1706 | ykvZ Peptidylprolyl isomerase YkvZ | YkvZ [Bacillus licheniformis DSM 13] | UniRef100_Q65KB9 | Bacillus licheniformis DSM 13 |
| 1707 | glcT transcriptional antiterminator | GlcT [Bacillus licheniformis DSM 13] | UniRef100_Q65KB8 | Bacillus licheniformis DSM 13 |
| 1708 | ptsG phosphotransferase system (PTS) glucose- | PtsG [Bacillus licheniformis DSM 13] | UniRef100_Q65KB7 | Bacillus licheniformis DSM 13 |
| | specific enzyme IICBA component | | | |
| 1709 | ptsH histidine-containing phosphocarrier protein of the | PtsH [Bacillus licheniformis DSM 13] | UniRef100_Q65KB6 | Bacillus licheniformis DSM 13 |
| | phosphotransferase system (PTS) (HPr protein) | | | |
| 1710 | ptsI phosphotransferase system (PTS) enzyme I | PtsI (Phosphotransferase system (PTS) enzyme I) [Bacillus | UniRef100_Q65KB5 | Bacillus licheniformis DSM 13 |
| | | licheniformis DSM 13] | | |
| 1711 | splA transcriptional regulator | SplA [Bacillus licheniformis DSM 13] | UniRef100_Q65KB4 | Bacillus licheniformis DSM 13 |
| 1712 | splB spore photoproduct (thymine dimer) lyase | SplB [Bacillus licheniformis DSM 13] | UniRef100_Q65KB3 | Bacillus licheniformis DSM 13 |
| 1713 | ykwB GCN5-related N-acetyltransferase YkwB | YkwB [Bacillus licheniformis DSM 13] | UniRef100_Q65KB2 | Bacillus licheniformis DSM 13 |
| 1714 | mcpC methyl-accepting chemotaxis protein | McpC [Bacillus licheniformis DSM 13] | UniRef100_Q65KB1 | Bacillus licheniformis DSM 13 |
| 1715 | BLP01646 beta-ketoacyl-acyl carrier protein | Hypothetical protein [Bacillus licheniformis DSM 13] | UniRef100_Q65KB0 | Bacillus licheniformis DSM 13 |
| | reductase | | | |
| 1716 | ykwC 3-hydroxyisobutyrate dehydrogenase YkwC | YkwC [Bacillus licheniformis DSM 13] | UniRef100_Q65KA9 | Bacillus licheniformis DSM 13 |
| 1717 | ykwD Allergen V5_Tpx-1 related YkwD | YkwD [Bacillus licheniformis DSM 13] | UniRef100_Q65KA8 | Bacillus licheniformis DSM 13 |
| 1718 | ykuA Penicillin-binding Protein dimerisation domain | YkuA [Bacillus licheniformis DSM 13] | UniRef100_Q65KA7 | Bacillus licheniformis DSM 13 |
| | YkuA | | | |
| 1719 | BLP01650 hypothetical protein | KinA [Bacillus licheniformis DSM 13] | UniRef100_Q65KA6 | Bacillus licheniformis DSM 13 |
| 1720 | patA putative aspartate transaminase | PatA [Bacillus licheniformis DSM 13] | UniRef100_Q65KA5 | Bacillus licheniformis DSM 13 |
| 1721 | BLP01652 hypothetical protein | Hypothetical protein [Bacillus licheniformis DSM 13] | UniRef100_Q62VQ6 | Bacillus licheniformis DSM 13 |
| 1722 | yxaI conserved hypothetical protein YxaI | YxaI [Bacillus licheniformis DSM 13] | UniRef100_Q65KA4 | Bacillus licheniformis DSM 13 |
| 1723 | yxiO MFS Sugar transporter superfamily protein | YxiO [Bacillus licheniformis DSM 13] | UniRef100_Q65KA3 | Bacillus licheniformis DSM 13 |
| 1724 | cheV CheV | Hypothetical protein cheV [Bacillus licheniformis DSM 13] | UniRef100_Q65KA2 | Bacillus licheniformis DSM 13 |
| 1725 | ykyB hypothetical protein YkyB | YkyB [Bacillus licheniformis DSM 13] | UniRef100_Q65KA1 | Bacillus licheniformis DSM 13 |
| 1726 | ykuC Drug antiporter protein YkuC | YkuC [Bacillus licheniformis DSM 13] | UniRef100_Q65KA0 | Bacillus licheniformis DSM 13 |
| 1727 | ykuD Peptidoglycan-binding protein YkuD | YkuD [Bacillus licheniformis DSM 13] | UniRef100_Q65K99 | Bacillus licheniformis DSM 13 |
| 1728 | BLP01660 hypothetical protein | Hypothetical protein [Bacillus licheniformis DSM 13] | UniRef100_Q65K98 | Bacillus licheniformis DSM 13 |
| 1729 | ykuE Hypothetical metallophosphoesterase YkuE | YkuE [Bacillus licheniformis DSM 13] | UniRef100_Q65K97 | Bacillus licheniformis DSM 13 |
| 1730 | ykuF Short-chain dehydrogenase_reductase YkuF | YkuF [Bacillus licheniformis DSM 13] | UniRef100_Q65K96 | Bacillus licheniformis DSM 13 |
| 1731 | ykuI YkuI | YkuI [Bacillus licheniformis DSM 13] | UniRef100_Q65K95 | Bacillus licheniformis DSM 13 |
| 1732 | BLP01663 hypothetical protein | | | |
| 1733 | BLP01664 hypothetical protein | Hypothetical protein [Bacillus licheniformis DSM 13] | UniRef100_Q65K94 | Bacillus licheniformis DSM 13 |
| 1734 | BLP01665 hypothetical protein | | | |
| 1735 | ykuJ YkuJ | YkuJ [Bacillus licheniformis DSM 13] | UniRef100_Q65K93 | Bacillus licheniformis DSM 13 |
| 1736 | BLP01667 hypothetical protein | Hypothetical protein [Bacillus anthracis] | UniRef100_Q81MP7 | Bacillus anthracis |
| 1737 | ykuK conserved hypothetical protein YkuK | YkuK [Bacillus licheniformis DSM 13] | UniRef100_Q65K92 | Bacillus licheniformis DSM 13 |
| 1738 | ykzF conserved hypothetical protein YkzF | YkzF [Bacillus licheniformis DSM 13] | UniRef100_Q65K91 | Bacillus licheniformis DSM 13 |
| 1739 | ykuL CBS domain protein YkuL | YkuL [Bacillus licheniformis DSM 13] | UniRef100_Q65K90 | Bacillus licheniformis DSM 13 |
| 1740 | ccpC transcriptional regulator | CcpC [Bacillus licheniformis DSM 13] | UniRef100_Q65K89 | Bacillus licheniformis DSM 13 |
| 1741 | ykuN Flavodoxin, short chain YkuN | YkuN [Bacillus licheniformis DSM 13] | UniRef100_Q65K88 | Bacillus licheniformis DSM 13 |
| 1742 | ykuO Glycoside hydrolase YkuO | YkuO [Bacillus licheniformis DSM 13] | UniRef100_Q65K87 | Bacillus licheniformis DSM 13 |
| 1743 | ykuP Flavodoxin, short chain YkuP | YkuP [Bacillus licheniformis DSM 13] | UniRef100_Q65K86 | Bacillus licheniformis DSM 13 |
| 1744 | ykuQ Tetrahydrodipicolinate succinylase | YkuQ [Bacillus licheniformis DSM 13] | UniRef100_Q65K85 | Bacillus licheniformis DSM 13 |
| 1745 | ykuR Peptidase M20D, amidohydrolase YkuR | YkuR [Bacillus licheniformis DSM 13] | UniRef100_Q65K84 | Bacillus licheniformis DSM 13 |
| 1746 | ykuS YkuS | YkuS [Bacillus licheniformis DSM 13] | UniRef100_Q65K83 | Bacillus licheniformis DSM 13 |
| 1747 | ykuU Alkyl hydroperoxide reductase | YkuU [Bacillus licheniformis DSM 13] | UniRef100_Q65K82 | Bacillus licheniformis DSM 13 |
| 1748 | ykuV Thioredoxin domain protein YkuV | YkuV [Bacillus licheniformis DSM 13] | UniRef100_Q65K81 | Bacillus licheniformis DSM 13 |
| 1749 | rok Rok | Hypothetical protein rok [Bacillus licheniformis DSM 13] | UniRef100_Q65K80 | Bacillus licheniformis DSM 13 |
| 1750 | yknT sigma-E controlled sporulation protein | YknT [Bacillus licheniformis DSM 13] | UniRef100_Q65K79 | Bacillus licheniformis DSM 13 |
| 1751 | mobA molybdopterin-guanine dinucleotide | MobA [Bacillus licheniformis DSM 13] | UniRef100_Q65K78 | Bacillus licheniformis DSM 13 |
| | biosynthesis protein A | | | |
| 1752 | moeB molybdopterin biosynthesis protein | MoeB [Bacillus licheniformis DSM 13] | UniRef100_Q65K77 | Bacillus licheniformis DSM 13 |
| 1753 | moeA molybdopterin biosynthesis protein | MoeA [Bacillus licheniformis DSM 13] | UniRef100_Q65K76 | Bacillus licheniformis DSM 13 |
| 1754 | mobB molybdopterin-guanine dinucleotide | MobB [Bacillus licheniformis DSM 13] | UniRef100_Q65K75 | Bacillus licheniformis DSM 13 |
| | biosynthesis protein B | | | |
| 1755 | moaE molybdopterin converting factor (subunit 2) | MoaE [Bacillus licheniformis DSM 13] | UniRef100_Q65K74 | Bacillus licheniformis DSM 13 |
| 1756 | moaD molybdopterin converting factor (subunit 1) | MoaD [Bacillus licheniformis DSM 13] | UniRef100_Q65K73 | Bacillus licheniformis DSM 13 |
| | MoaD | | | |
| 1757 | BLP01687 conserved hypothetical protein | Hypothetical protein [Bacillus licheniformis DSM 13] | UniRef100_Q65K72 | Bacillus licheniformis DSM 13 |
| 1758 | yknU ABC transporter YknU | YknU [Bacillus licheniformis DSM 13] | UniRef100_Q65K71 | Bacillus licheniformis DSM 13 |
| 1759 | yknV ABC transporter YknV | YknV [Bacillus licheniformis DSM 13] | UniRef100_Q65K70 | Bacillus licheniformis DSM 13 |
| 1760 | yknW conserved hypothetical protein YknW | YknW [Bacillus licheniformis DSM 13] | UniRef100_Q65K69 | Bacillus licheniformis DSM 13 |
| 1761 | yknX putative secretion protein, protein transporter | YknX [Bacillus licheniformis DSM 13] | UniRef100_Q65K68 | Bacillus licheniformis DSM 13 |
| | YknX | | | |
| 1762 | yknY ABC transporter YknY | YknY [Bacillus licheniformis DSM 13] | UniRef100_Q65K67 | Bacillus licheniformis DSM 13 |
| 1763 | yknZ putative ABC transporter permease YknZ | YknZ [Bacillus licheniformis DSM 13] | UniRef100_Q65K66 | Bacillus licheniformis DSM 13 |
| 1764 | fruR transcriptional regulator (DeoR family) | FruR [Bacillus licheniformis DSM 13] | UniRef100_Q65K65 | Bacillus licheniformis DSM 13 |
| 1765 | fruK fructose-1-phosphate kinase | FruK [Bacillus licheniformis DSM 13] | UniRef100_Q65K64 | Bacillus licheniformis DSM 13 |
| 1766 | fruA Phosphotransferase system (PTS) fructose- | FruA (Phosphotransferase system (PTS) fructose-specific | UniRef100_Q65K63 | Bacillus licheniformis DSM 13 |
| | specific enzyme IIABC component FruA | enzyme IIABC component) [Bacillus licheniformis DSM 13] | | |
| 1767 | sipT type I signal peptidase | Signal peptidase I [Bacillus licheniformis] | UniRef100_P42668 | Bacillus licheniformis |
| 1768 | ykoA conserved hypothetical protein YkoA | YkoA [Bacillus licheniformis DSM 13] | UniRef100_Q65K61 | Bacillus licheniformis DSM 13 |
| 1769 | BLP01699 hypothetical protein | Hypothetical protein [Bacillus licheniformis DSM 13] | UniRef100_Q65K60 | Bacillus licheniformis DSM 13 |
| 1770 | ykpA ABC transporter YkpA | YkpA [Bacillus licheniformis DSM 13] | UniRef100_Q65K59 | Bacillus licheniformis DSM 13 |
| 1771 | BLP01701 conserved hypothetical protein | Hypothetical protein [Bacillus licheniformis DSM 13] | UniRef100_Q65K58 | Bacillus licheniformis DSM 13 |
| 1772 | ampS aminopeptidase | AmpS [Bacillus licheniformis DSM 13] | UniRef100_Q65K57 | Bacillus licheniformis DSM 13 |
| 1773 | ykpC conserved hypothetical protein YkpC | Hypothetical protein [Bacillus licheniformis DSM 13] | UniRef100_Q62VK8 | Bacillus licheniformis DSM 13 |
| 1774 | mreBH cell-shape determining protein | MreBH [Bacillus licheniformis DSM 13] | UniRef100_Q65K55 | Bacillus licheniformis DSM 13 |
| 1775 | BLP01705 hypothetical protein | | | |
| 1776 | abhB transcriptional regulator of transition state genes | Abh [Bacillus licheniformis DSM 13] | UniRef100_Q65K54 | Bacillus licheniformis DSM 13 |
| | (AbrB-like) | | | |
| 1777 | kinC two-component sensor histidine kinase | KinC [Bacillus licheniformis DSM 13] | UniRef100_Q65K53 | Bacillus licheniformis DSM 13 |
| 1778 | ktrC NAD-binding site | YkqB [Bacillus licheniformis DSM 13] | UniRef100_Q65K52 | Bacillus licheniformis DSM 13 |
| 1779 | BLP01709 hypothetical protein | | | |
| 1780 | adeC adenine deaminase | AdeC [Bacillus licheniformis DSM 13] | UniRef100_Q65K51 | Bacillus licheniformis DSM 13 |
| 1781 | ykqC essential RNase J1_J2, metallo-beta-lactamase | YkqC [Bacillus licheniformis DSM 13] | UniRef100_Q65K50 | Bacillus licheniformis DSM 13 |
| | superfamily protein YkqC | | | |
| 1782 | ykzG conserved hypothetical protein YkzG | YkzG [Bacillus licheniformis DSM 13] | UniRef100_Q65K49 | Bacillus licheniformis DSM 13 |
| 1783 | BLP04727 hypothetical protein | | | |
| 1784 | ykrA putative HAD hydrolase YkrA | YkrA [Bacillus licheniformis DSM 13] | UniRef100_Q65K48 | Bacillus licheniformis DSM 13 |
| 1785 | defB main formylmethionine deformylase | YkrB [Bacillus licheniformis DSM 13] | UniRef100_Q65K47 | Bacillus licheniformis DSM 13 |
| 1786 | BLP01715 conserved hypothetical protein | | | |
| 1787 | ykyA putative transcription factor, conserved | Helix-turn-helix, Fis-type, Helix-turn-helix, Fis-type [Bacillus | UniRef100_Q62VJ7 | Bacillus licheniformis DSM 13 |
| | hypothetical YkyA | licheniformis DSM 13] | | |
| 1788 | pdhA pyruvate dehydrogenase (E1 alpha subunit) | PdhA [Bacillus licheniformis DSM 13] | UniRef100_Q65K44 | Bacillus licheniformis DSM 13 |
| 1789 | pdhB pyruvate dehydrogenase (E1 beta subunit) | PdhB [Bacillus licheniformis DSM 13] | UniRef100_Q65K43 | Bacillus licheniformis DSM 13 |
| 1790 | pdhC pyruvate dehydrogenase (dihydrolipoamide | PdhC [Bacillus licheniformis DSM 13] | UniRef100_Q65K42 | Bacillus licheniformis DSM 13 |
| | acetyltransferase E2 subunit) | | | |
| 1791 | pdhD dihydrolipoamide dehydrogenase E3 subunit of | PdhD [Bacillus licheniformis DSM 13] | UniRef100_Q65K41 | Bacillus licheniformis DSM 13 |
| | both pyruvate dehydrogenase and 2-oxoglutarate | | | |
| | dehydrogenase complexes | | | |
| 1792 | BLP01721 hypothetical protein | | | |
| 1793 | BLP01722 conserved hypothetical protein | Hypothetical protein [Bacillus licheniformis DSM 13] | UniRef100_Q62VI9 | Bacillus licheniformis DSM 13 |
| 1794 | speA arginine decarboxylase | SpeA [Bacillus licheniformis DSM 13] | UniRef100_Q65K37 | Bacillus licheniformis DSM 13 |
| 1795 | BLP01724 hypothetical protein | | | |
| 1796 | yktA conserved hypothetical protein YktA | YktA [Bacillus licheniformis DSM 13] | UniRef100_Q65K36 | Bacillus licheniformis DSM 13 |
| 1797 | yktB conserved hypothetical protein YktB | YktB [Bacillus licheniformis DSM 13] | UniRef100_Q65K35 | Bacillus licheniformis DSM 13 |
| 1798 | ykzI conserved hypothetical YkzI | | | |
| 1799 | suhB Inositol monophosphatase SuhB | YktC [Bacillus licheniformis DSM 13] | UniRef100_Q65K33 | Bacillus licheniformis DSM 13 |
| 1800 | ykzC GCN5-related N-acetyltransferase YkzC | YkzC [Bacillus licheniformis DSM 13] | UniRef100_Q65K32 | Bacillus licheniformis DSM 13 |
| 1801 | ylaA conserved hypothetical protein YlaA | YlaA [Bacillus licheniformis DSM 13] | UniRef100_Q65K31 | Bacillus licheniformis DSM 13 |
| 1802 | ylaB conserved hypothetical ylaB | YlaB [Bacillus licheniformis DSM 13] | UniRef100_Q65K30 | Bacillus licheniformis DSM 13 |
| 1803 | ylaC ECF sigma factor YlaC | YlaC [Bacillus licheniformis DSM 13] | UniRef100_Q65K29 | Bacillus licheniformis DSM 13 |
| 1804 | ylaD antisigma factor for YlaC | YlaD [Bacillus licheniformis DSM 13] | UniRef100_Q65K28 | Bacillus licheniformis DSM 13 |
| 1805 | ylaF conserved hypothetical protein YlaF | YlaF [Bacillus licheniformis DSM 13] | UniRef100_Q65K27 | Bacillus licheniformis DSM 13 |
| 1806 | typA GTP-binding protein TypA | YlaG [Bacillus licheniformis DSM 13] | UniRef100_Q65K26 | Bacillus licheniformis DSM 13 |
| 1807 | ylaH conserved hypothetical protein YlaH | YlaH [Bacillus licheniformis DSM 13] | UniRef100_Q65K25 | Bacillus licheniformis DSM 13 |
| 1808 | yhjH conserved hypothetical DNA-binding protein | YhjH [Bacillus licheniformis DSM 13] | UniRef100_Q65K24 | Bacillus licheniformis DSM 13 |
| | YhjH | | | |
| 1809 | yhjG putative Flavoprotein monooxygenase YhjG | YhjG [Bacillus licheniformis DSM 13] | UniRef100_Q65K23 | Bacillus licheniformis DSM 13 |
| 1810 | ylaI YlaI | YlaI [Bacillus licheniformis DSM 13] | UniRef100_Q65K22 | Bacillus licheniformis DSM 13 |
| 1811 | ylaJ conserved hypothetical protein YlaJ | YlaJ [Bacillus licheniformis DSM 13] | UniRef100_Q65K21 | Bacillus licheniformis DSM 13 |
| 1812 | ylaK Nucleotide binding protein YlaK | YlaK [Bacillus licheniformis DSM 13] | UniRef100_Q65K20 | Bacillus licheniformis DSM 13 |
| 1813 | ylaL conserved hypothetical protein YlaL | YlaL [Bacillus licheniformis DSM 13] | UniRef100_Q65K19 | Bacillus licheniformis DSM 13 |
| 1814 | ylaM Glutaminase YlaM | YlaM [Bacillus licheniformis DSM 13] | UniRef100_Q65K18 | Bacillus licheniformis DSM 13 |
| 1815 | ylaN YlaN | YlaN [Bacillus licheniformis DSM 13] | UniRef100_Q65K17 | Bacillus licheniformis DSM 13 |
| 1816 | BLP01743 hypothetical protein | | | |
| 1817 | ftsW cell-division protein | FtsW [Bacillus licheniformis DSM 13] | UniRef100_Q65K16 | Bacillus licheniformis DSM 13 |
| 1818 | pycA pyruvate carboxylase | PycA [Bacillus licheniformis DSM 13] | UniRef100_Q65K15 | Bacillus licheniformis DSM 13 |
| 1819 | ctaA heme-containing membrane protein CtaA | CtaA [Bacillus licheniformis DSM 13] | UniRef100_Q65K14 | Bacillus licheniformis DSM 13 |
| 1820 | ctaB cytochrome caa3 oxydase assembly factor | CtaB [Bacillus licheniformis DSM 13] | UniRef100_Q65K13 | Bacillus licheniformis DSM 13 |
| 1821 | ctaC cytochrome caa3 oxidase (subunit II) | CtaC [Bacillus licheniformis DSM 13] | UniRef100_Q65K12 | Bacillus licheniformis DSM 13 |
| 1822 | ctaD cytochrome caa3 oxidase (subunit I) | CtaD [Bacillus licheniformis DSM 13] | UniRef100_Q65K11 | Bacillus licheniformis DSM 13 |
| 1823 | ctaE cytochrome caa3 oxidase (subunit III) | CtaE [Bacillus licheniformis DSM 13] | UniRef100_Q65K10 | Bacillus licheniformis DSM 13 |
| 1824 | ctaF cytochrome caa3 oxidase (subunit IV) | CtaF [Bacillus licheniformis DSM 13] | UniRef100_Q65K09 | Bacillus licheniformis DSM 13 |
| 1825 | ctaG CtaG | Hypothetical protein ctaG [Bacillus licheniformis DSM 13] | UniRef100_Q65K08 | Bacillus licheniformis DSM 13 |
| 1826 | ylbA conserved hypothetical protein YlbA | YlbA [Bacillus licheniformis DSM 13] | UniRef100_Q65K07 | Bacillus licheniformis DSM 13 |
| 1827 | ylbB YlbB | CBS domain [Bacillus licheniformis DSM 13] | UniRef100_Q62VF7 | Bacillus licheniformis DSM 13 |
| 1828 | ylbC conserved hypothetical protein YlbC | YlbC [Bacillus licheniformis DSM 13] | UniRef100_Q65K05 | Bacillus licheniformis DSM 13 |
| 1829 | ylbD conserved hypothetical protein YlbD | YlbD [Bacillus licheniformis DSM 13] | UniRef100_Q65K04 | Bacillus licheniformis DSM 13 |
| 1830 | ylbE conserved hypothetical protein YlbE | YlbE [Bacillus licheniformis DSM 13] | UniRef100_Q65K03 | Bacillus licheniformis DSM 13 |
| 1831 | BLP01758 hypothetical protein | | | |
| 1832 | ylbF YlbF | YlbF [Bacillus licheniformis DSM 13] | UniRef100_Q65K02 | Bacillus licheniformis DSM 13 |
| 1833 | ylbG conserved hypothetical protein YlbG | YlbG [Bacillus licheniformis DSM 13] | UniRef100_Q65K01 | Bacillus licheniformis DSM 13 |
| 1834 | ylbH Adenine-specific DNA methylase YlbH | YlbH [Bacillus licheniformis DSM 13] | UniRef100_Q65K00 | Bacillus licheniformis DSM 13 |
| 1835 | coaD Coenzyme A biosynthesis | YlbI [Bacillus licheniformis DSM 13] | UniRef100_Q65JZ9 | Bacillus licheniformis DSM 13 |
| | protein, Cytidyltransferase-related domain | | | |
| 1836 | BLP01763 hypothetical protein | | | |
| 1837 | ylbJ YlbJ | Hypothetical protein [Bacillus licheniformis DSM 13] | UniRef100_Q62VE9 | Bacillus licheniformis DSM 13 |
| 1838 | BLP01765 hypothetical protein | | | |
| 1839 | ylbL YlbL | YlbL [Bacillus licheniformis DSM 13] | UniRef100_Q65JZ7 | Bacillus licheniformis DSM 13 |
| 1840 | ylbM conserved hypothetical protein | YlbM [Bacillus licheniformis DSM 13] | UniRef100_Q65JZ6 | Bacillus licheniformis DSM 13 |
| 1841 | ylbN conserved hypothetical protein | YlbN [Bacillus licheniformis DSM 13] | UniRef100_Q65JZ5 | Bacillus licheniformis DSM 13 |
| 1842 | rpmF ribosomal protein L32 | RpmF [Bacillus licheniformis DSM 13] | UniRef100_Q65JZ4 | Bacillus licheniformis DSM 13 |
| 1843 | ylbO DNA-binding domain protein YlbO | YlbO [Bacillus licheniformis DSM 13] | UniRef100_Q65JZ3 | Bacillus licheniformis DSM 13 |
| 1844 | ylbP GCN5-related N-acetyltransferase YlbP | YlbP [Bacillus licheniformis DSM 13] | UniRef100_Q65JZ2 | Bacillus licheniformis DSM 13 |
| 1845 | panE 2-dehydropantoate 2-reductase | YlbQ [Bacillus licheniformis DSM 13] | UniRef100_Q65JZ1 | Bacillus licheniformis DSM 13 |
| 1846 | yllA conserved hypothetical protein YllA | YllA [Bacillus licheniformis DSM 13] | UniRef100_Q65JZ0 | Bacillus licheniformis DSM 13 |
| 1847 | mraZ conserved protein MraZ | Hypothetical protein mraZ [Bacillus licheniformis DSM 13] | UniRef100_Q62VE0 | Bacillus licheniformis DSM 13 |
| 1848 | mraW putative methyltransferase | YlxA [Bacillus licheniformis DSM 13] | UniRef100_Q65JY8 | Bacillus licheniformis DSM 13 |
| 1849 | ftsL cell-division protein | FtsL [Bacillus licheniformis DSM 13] | UniRef100_Q65JY7 | Bacillus licheniformis DSM 13 |
| 1850 | pbpB penicillin-binding protein 2B | PbpB [Bacillus licheniformis DSM 13] | UniRef100_Q65JY6 | Bacillus licheniformis DSM 13 |
| 1851 | BLP01777 hypothetical protein | | | |
| 1852 | spoVD penicillin-binding protein | SpoVD [Bacillus licheniformis DSM 13] | UniRef100_Q65JY5 | Bacillus licheniformis DSM 13 |
| 1853 | BLP01779 hypothetical protein | | | |
| 1854 | murE UDP-N-acetylmuramoylalanyl-D-glutamate-2,6- | MurE [Bacillus licheniformis DSM 13] | UniRef100_Q65JY4 | Bacillus licheniformis DSM 13 |
| | diaminopimelate ligase | | | |
| 1855 | mraY phospho-N-acetylmuramoyl- | MraY [Bacillus licheniformis DSM 13] | UniRef100_Q65JY3 | Bacillus licheniformis DSM 13 |
| | pentapeptidetransferase | | | |
| 1856 | murD UDP-N-acetylmuramoylalanyl-D-glutamate | MurD [Bacillus licheniformis DSM 13] | UniRef100_Q65JY2 | Bacillus licheniformis DSM 13 |
| | ligase | | | |
| 1857 | spoVE SpoVE | Hypothetical protein spoVE [Bacillus licheniformis DSM 13] | UniRef100_Q65JY1 | Bacillus licheniformis DSM 13 |
| 1858 | murG Glycosyl transferase Family 28 | MurG (UDP-N-acetylglucosamine-N-acetylmuramyl- | UniRef100_Q65JY0 | Bacillus licheniformis DSM 13 |
| | | (Pentapeptide)pyrophosphoryl-undecaprenol N- | | |
| | | acetylglucosamine transferase) [Bacillus licheniformis DSM | | |
| | | 13] | | |
| 1859 | murB UDP-N-acetylenolpyruvoylglucosamine | MurB [Bacillus licheniformis DSM 13] | UniRef100_Q65JX9 | Bacillus licheniformis DSM 13 |
| | reductase | | | |
| 1860 | divlB cell-division initiation protein | DivlB [Bacillus licheniformis DSM 13] | UniRef100_Q65JX8 | Bacillus licheniformis DSM 13 |
| 1861 | ylxW conserved hypothetical protein YlxW | YlxW [Bacillus licheniformis DSM 13] | UniRef100_Q65JX7 | Bacillus licheniformis DSM 13 |
| 1862 | ylxX conserved hypothetical protein YlxX | YlxX [Bacillus licheniformis DSM 13] | UniRef100_Q65JX6 | Bacillus licheniformis DSM 13 |
| 1863 | sbp small basic protein | Sbp [Bacillus licheniformis DSM 13] | UniRef100_Q65JX5 | Bacillus licheniformis DSM 13 |
| 1864 | ftsA cell-division protein | FtsA [Bacillus licheniformis DSM 13] | UniRef100_Q65JX4 | Bacillus licheniformis DSM 13 |
| 1865 | ftsZ cell-division initiation protein | FtsZ [Bacillus licheniformis DSM 13] | UniRef100_Q65JX3 | Bacillus licheniformis DSM 13 |
| 1866 | BLP01792 hypothetical protein | | | |
| 1867 | bprA bacillopeptidase F | Hypothetical protein [Bacillus licheniformis DSM 13] | UniRef100_Q65JX2 | Bacillus licheniformis DSM 13 |
| 1868 | bprB bacillopeptidase F | Bpr [Bacillus licheniformis DSM 13] | UniRef100_Q65JX1 | Bacillus licheniformis DSM 13 |
| 1869 | spoIIGA protease SpoIIGA | SpoIIGA [Bacillus licheniformis DSM 13] | UniRef100_Q65JX0 | Bacillus licheniformis DSM 13 |
| 1870 | sigE RNA polymerase sporulation-specific sigma-29 | SigE [Bacillus licheniformis DSM 13] | UniRef100_Q65JW9 | Bacillus licheniformis DSM 13 |
| | factor (sigma-E) | | | |
| 1871 | sigG RNA polymerase sporulation-specific sigma | SigG [Bacillus licheniformis DSM 13] | UniRef100_Q65JW8 | Bacillus licheniformis DSM 13 |
| | factor (sigma-G) | | | |
| 1872 | ylmA ABC transporter YlmA | YlmA [Bacillus licheniformis DSM 13] | UniRef100_Q65JW7 | Bacillus licheniformis DSM 13 |
| 1873 | BLP01799 conserved hypothetical protein | YxjB [Bacillus licheniformis DSM 13] | UniRef100_Q65JW5 | Bacillus licheniformis DSM 13 |
| 1874 | ylmC YlmC | YlmC [Bacillus licheniformis DSM 13] | UniRef100_Q65JW4 | Bacillus licheniformis DSM 13 |
| 1875 | ylmD conserved hypothetical protein YlmD | YlmD [Bacillus licheniformis DSM 13] | UniRef100_Q65JW3 | Bacillus licheniformis DSM 13 |
| 1876 | ylmE putative carboxypeptidase YlmE | YlmE [Bacillus licheniformis DSM 13] | UniRef100_Q65JW2 | Bacillus licheniformis DSM 13 |
| 1877 | ylmF divisiome protein YlmF | YlmF [Bacillus licheniformis DSM 13] | UniRef100_Q65JW1 | Bacillus licheniformis DSM 13 |
| 1878 | ylmG conserved hypothetical protein | YlmG [Bacillus licheniformis DSM 13] | UniRef100_Q65JW0 | Bacillus licheniformis DSM 13 |
| 1879 | ylmH RNA-binding protein YlmH | YlmH [Bacillus licheniformis DSM 13] | UniRef100_Q65JV9 | Bacillus licheniformis DSM 13 |
| 1880 | divIVA cell-division initiation protein | DivIVA [Bacillus licheniformis DSM 13] | UniRef100_Q65JV8 | Bacillus licheniformis DSM 13 |
| 1881 | ileS isoleucyl-tRNA synthetase | IleS [Bacillus licheniformis DSM 13] | UniRef100_Q65JV7 | Bacillus licheniformis DSM 13 |
| 1882 | ylyA conserved hypothetical protein YlyA | YlyA [Bacillus licheniformis DSM 13] | UniRef100_Q65JV6 | Bacillus licheniformis DSM 13 |
| 1883 | BLP04927 hypothetical protein | Hypothetical protein [Bacillus licheniformis DSM 13] | UniRef100_Q65JV5 | Bacillus licheniformis DSM 13 |
| 1884 | lspA signal peptidase II LspA | LspA [Bacillus licheniformis DSM 13] | UniRef100_Q65JV4 | Bacillus licheniformis DSM 13 |
| 1885 | ylyB putative RNA pseudouridine synthase YlyB | YlyB [Bacillus licheniformis DSM 13] | UniRef100_Q65JV3 | Bacillus licheniformis DSM 13 |
| 1886 | pyrR transcriptional attenuator and uracil | PyrR [Bacillus licheniformis DSM 13] | UniRef100_Q65JV2 | Bacillus licheniformis DSM 13 |
| | phosphoribosyltransferase activity (minor) | | | |
| 1887 | BLP01812 hypothetical protein | | | |
| 1888 | pyrP uracil permease | PyrP [Bacillus licheniformis DSM 13] | UniRef100_Q65JV1 | Bacillus licheniformis DSM 13 |
| 1889 | pyrB aspartate carbamoyltransferase | PyrB [Bacillus licheniformis DSM 13] | UniRef100_Q65JV0 | Bacillus licheniformis DSM 13 |
| 1890 | pyrC dihydroorotase | PyrC [Bacillus licheniformis DSM 13] | UniRef100_Q65JU9 | Bacillus licheniformis DSM 13 |
| 1891 | pyrAA carbamoyl-phosphate synthetase (glutaminase | PyrAA [Bacillus licheniformis DSM 13] | UniRef100_Q65JU8 | Bacillus licheniformis DSM 13 |
| | subunit) | | | |
| 1892 | pyrAB carbamoyl-phosphate synthetase (catalytic | PyrAB [Bacillus licheniformis DSM 13] | UniRef100_Q65JU7 | Bacillus licheniformis DSM 13 |
| | subunit) | | | |
| 1893 | pyrK dihydroorotate dehydrogenase (electron transfer | PyrK [Bacillus licheniformis DSM 13] | UniRef100_Q65JU6 | Bacillus licheniformis DSM 13 |
| | subunit) | | | |
| 1894 | pyrD dihydroorotate dehydrogenase (catalytic subunit) | PyrD [Bacillus licheniformis DSM 13] | UniRef100_Q65JU5 | Bacillus licheniformis DSM 13 |
| 1895 | pyrF orotidine 5′-phosphate decarboxylase | PyrF [Bacillus licheniformis DSM 13] | UniRef100_Q65JU4 | Bacillus licheniformis DSM 13 |
| 1896 | pyrE orotate phosphoribosyltransferase | PyrE [Bacillus licheniformis DSM 13] | UniRef100_Q65JU3 | Bacillus licheniformis DSM 13 |
| 1897 | BLP01822 conserved hypothetical protein | Hypothetical protein [Bacillus licheniformis DSM 13] | UniRef100_Q65JU2 | Bacillus licheniformis DSM 13 |
| 1898 | cysH phosphoadenosine phosphosulfate | Hypothetical protein [Bacillus licheniformis DSM 13] | UniRef100_Q65JU1 | Bacillus licheniformis DSM 13 |
| 1899 | cysPA sulfate permease | CysP [Bacillus licheniformis DSM 13] | UniRef100_Q65JU0 | Bacillus licheniformis DSM 13 |
| 1900 | sat sulfate adenylyltransferase | Sat [Bacillus licheniformis DSM 13] | UniRef100_Q65JT9 | Bacillus licheniformis DSM 13 |
| 1901 | cysC adenylylsulfate kinase | CysC [Bacillus licheniformis DSM 13] | UniRef100_Q65JT8 | Bacillus licheniformis DSM 13 |
| 1902 | cysG Uroporphyrin-III C-methyltransferase, C-terminal | YlnD [Bacillus licheniformis DSM 13] | UniRef100_Q65JT7 | Bacillus licheniformis DSM 13 |
| 1903 | sirB Cobalamin (vitamin B12) biosynthesis CbiX | YlnE (Cobalamin (Vitamin B12) biosynthesis CbiX protein) | UniRef100_Q65JT6 | Bacillus licheniformis DSM 13 |
| | protein | [Bacillus licheniformis DSM 13] | | |
| 1904 | sirA Siroheme synthase SirA | YlnF [Bacillus licheniformis DSM 13] | UniRef100_Q65JT5 | Bacillus licheniformis DSM 13 |
| 1905 | yloA putative fibronectin binding protein YloA | YloA [Bacillus licheniformis DSM 13] | UniRef100_Q65JT4 | Bacillus licheniformis DSM 13 |
| 1906 | yloB ATPase, E1-E2 type protein YloB | YloB [Bacillus licheniformis DSM 13] | UniRef100_Q65JT3 | Bacillus licheniformis DSM 13 |
| 1907 | yloC Conserved hypothetical protein YloC | YloC [Bacillus licheniformis DSM 13] | UniRef100_Q65JT2 | Bacillus licheniformis DSM 13 |
| 1908 | ylzA conserved hypothetical protein YlzA | YlzA [Bacillus licheniformis DSM 13] | UniRef100_Q65JT1 | Bacillus licheniformis DSM 13 |
| 1909 | gmk guanylate kinase | Guanylate kinase [Bacillus licheniformis DSM 13] | UniRef100_Q62V85 | Bacillus licheniformis DSM 13 |
| 1910 | rpoZ RNA polymerase, omega subunit | YloH [Bacillus licheniformis DSM 13] | UniRef100_Q65JS9 | Bacillus licheniformis DSM 13 |
| 1911 | yloI DNA_pantothenate metabolism flavoprotein YloI | YloI [Bacillus licheniformis DSM 13] | UniRef100_Q65JS8 | Bacillus licheniformis DSM 13 |
| 1912 | priA primosomal replication factor Y (primosomal | PriA [Bacillus licheniformis DSM 13] | UniRef100_Q65JS7 | Bacillus licheniformis DSM 13 |
| | protein N′) | | | |
| 1913 | def polypeptide deformylase | Def [Bacillus licheniformis DSM 13] | UniRef100_Q65JS6 | Bacillus licheniformis DSM 13 |
| 1914 | fmt methionyl-tRNA formyltransferase Fmt | Fmt [Bacillus licheniformis DSM 13] | UniRef100_Q65JS5 | Bacillus licheniformis DSM 13 |
| 1915 | rsmB rRNA SAM-dependent methyltransferase | Fmu, rRNA SAM-dependent methyltransferase [Bacillus | UniRef100_Q62V79 | Bacillus licheniformis DSM 13 |
| | RmsB | licheniformis DSM 13] | | |
| 1916 | yloN Conserved hypothetical protein YloN | YloN [Bacillus licheniformis DSM 13] | UniRef100_Q65JS3 | Bacillus licheniformis DSM 13 |
| 1917 | prpC protein phosphatase | PrpC [Bacillus licheniformis DSM 13] | UniRef100_Q65JS2 | Bacillus licheniformis DSM 13 |
| 1918 | prkC protein kinase PrkC | PrkC [Bacillus licheniformis DSM 13] | UniRef100_Q65JS1 | Bacillus licheniformis DSM 13 |
| 1919 | engC GTP binding protein EngC | YloQ [Bacillus licheniformis DSM 13] | UniRef100_Q65JS0 | Bacillus licheniformis DSM 13 |
| 1920 | rpe ribulose-5-phosphate 3-epimerase Rpe | Rpe [Bacillus licheniformis DSM 13] | UniRef100_Q65JR9 | Bacillus licheniformis DSM 13 |
| 1921 | yloS Thiamine pyrophosphokinase YloS | YloS [Bacillus licheniformis DSM 13] | UniRef100_Q65JR8 | Bacillus licheniformis DSM 13 |
| 1922 | spoVM SpoVM | Stage V sporulation protein M [Bacillus subtilis] | UniRef100_P37817 | Bacillus subtilis |
| 1923 | rpmB 50S ribosomal protein L28 RpmB | RpmB [Bacillus licheniformis DSM 13] | UniRef100_Q65JR6 | Bacillus licheniformis DSM 13 |
| 1924 | yloU highly conserved hypothetical protein YloU | YloU [Bacillus licheniformis DSM 13] | UniRef100_Q65JR5 | Bacillus licheniformis DSM 13 |
| 1925 | yloV glycerone kinase protein YloV | Dak phosphatase domain [Bacillus licheniformis DSM 13] | UniRef100_Q62V69 | Bacillus licheniformis DSM 13 |
| 1926 | sdaAB L-serine dehydratase (beta chain) | SdaAB [Bacillus licheniformis DSM 13] | UniRef100_Q65JR3 | Bacillus licheniformis DSM 13 |
| 1927 | sdaAA L-serine dehydratase (alpha chain) | SdaAA [Bacillus licheniformis DSM 13] | UniRef100_Q65JR2 | Bacillus licheniformis DSM 13 |
| 1928 | recG ATP-dependent DNA helicase | RecG [Bacillus licheniformis DSM 13] | UniRef100_Q65JR1 | Bacillus licheniformis DSM 13 |
| 1929 | fapR Transcription factor FapR | YlpC [Bacillus licheniformis DSM 13] | UniRef100_Q65JR0 | Bacillus licheniformis DSM 13 |
| 1930 | plsX phospholipid biosythesis protein PlsX | Hypothetical protein plsX [Bacillus licheniformis DSM 13] | UniRef100_Q65JQ9 | Bacillus licheniformis DSM 13 |
| 1931 | fabD malonyl CoA-acyl carrier protein transacylase | FabD [Bacillus licheniformis DSM 13] | UniRef100_Q65JQ8 | Bacillus licheniformis DSM 13 |
| 1932 | fabG beta-ketoacyl-acyl carrier protein reductase | FabG [Bacillus licheniformis DSM 13] | UniRef100_Q65JQ7 | Bacillus licheniformis DSM 13 |
| 1933 | acpA acyl carrier protein | AcpA [Bacillus licheniformis DSM 13] | UniRef100_Q65JQ6 | Bacillus licheniformis DSM 13 |
| 1934 | rnc ribonuclease III | Rnc [Bacillus licheniformis DSM 13] | UniRef100_Q65JQ5 | Bacillus licheniformis DSM 13 |
| 1935 | smc chromosome segregation SMC protein homolg | Smc [Bacillus licheniformis DSM 13] | UniRef100_Q65JQ4 | Bacillus licheniformis DSM 13 |
| 1936 | ftsY signal recognition particle (docking protein) | FtsY [Bacillus licheniformis DSM 13] | UniRef100_Q65JQ3 | Bacillus licheniformis DSM 13 |
| 1937 | ylxM Bipartite response regulator, C-terminal effector | YlxM [Bacillus licheniformis DSM 13] | UniRef100_Q65JQ2 | Bacillus licheniformis DSM 13 |
| | YlxM | | | |
| 1938 | ffh signal recognition particle-like (SRP) component | Ffh (Signal recognition particle-like (SRP) component) | UniRef100_Q65JQ1 | Bacillus licheniformis DSM 13 |
| | | [Bacillus licheniformis DSM 13] | | |
| 1939 | rpsP ribosomal protein S16 (BS17) | RpsP [Bacillus licheniformis DSM 13] | UniRef100_Q65JQ0 | Bacillus licheniformis DSM 13 |
| 1940 | ylqC conserved hypothetical protein YlqC | KH domain, prokaryotic type [Bacillus licheniformis DSM 13] | UniRef100_Q62V54 | Bacillus licheniformis DSM 13 |
| 1941 | ylqD conserved hypothetical protein YlqD | YlqD [Bacillus licheniformis DSM 13] | UniRef100_Q65JP8 | Bacillus licheniformis DSM 13 |
| 1942 | rimM 16S rRNA processing protein | RimM [Bacillus licheniformis DSM 13] | UniRef100_Q65JP7 | Bacillus licheniformis DSM 13 |
| 1943 | trmD tRNA methyltransferase | TrmD [Bacillus licheniformis DSM 13] | UniRef100_Q65JP6 | Bacillus licheniformis DSM 13 |
| 1944 | BLP04728 hypothetical protein | | | |
| 1945 | rplS ribosomal protein L19 | RplS [Bacillus licheniformis DSM 13] | UniRef100_Q65JP5 | Bacillus licheniformis DSM 13 |
| 1946 | BLP04729 hypothetical protein | | | |
| 1947 | ylqF GTP-binding domain protein YlqF | YlqF [Bacillus licheniformis DSM 13] | UniRef100_Q65JP4 | Bacillus licheniformis DSM 13 |
| 1948 | rnhB ribonuclease HII | RnhB [Bacillus licheniformis DSM 13] | UniRef100_Q65JP3 | Bacillus licheniformis DSM 13 |
| 1949 | ylqG conserved hypothetical protein YlqG | Hypothetical protein [Bacillus licheniformis DSM 13] | UniRef100_Q62V47 | Bacillus licheniformis DSM 13 |
| 1950 | ylqH conserved hypothetical protein YlqH | YlqH [Bacillus licheniformis DSM 13] | UniRef100_Q65JP1 | Bacillus licheniformis DSM 13 |
| 1951 | sucC succinyl-CoA synthetase (beta subunit) | SucC [Bacillus licheniformis DSM 13] | UniRef100_Q65JP0 | Bacillus licheniformis DSM 13 |
| 1952 | sucD succinyl-CoA synthetase (alpha subunit) | SucD [Bacillus licheniformis DSM 13] | UniRef100_Q65JN9 | Bacillus licheniformis DSM 13 |
| 1953 | smf DNA processing Smf protein homolog | Smf [Bacillus licheniformis DSM 13] | UniRef100_Q65JN8 | Bacillus licheniformis DSM 13 |
| 1954 | topA DNA topoisomerase I | TopA [Bacillus licheniformis DSM 13] | UniRef100_Q65JN7 | Bacillus licheniformis DSM 13 |
| 1955 | gid glucose-inhibited division protein | Gid [Bacillus licheniformis DSM 13] | UniRef100_Q65JN6 | Bacillus licheniformis DSM 13 |
| 1956 | xerC site-specific integrase_recombinase | CodV [Bacillus licheniformis DSM 13] | UniRef100_Q65JN5 | Bacillus licheniformis DSM 13 |
| 1957 | clpQ two-component ATP-dependent protease (N- | ClpQ [Bacillus licheniformis DSM 13] | UniRef100_Q65JN4 | Bacillus licheniformis DSM 13 |
| | terminal serine protease) | | | |
| 1958 | clpY two-component ATP-dependent protease (N- | ClpY [Bacillus licheniformis DSM 13] | UniRef100_Q65JN3 | Bacillus licheniformis DSM 13 |
| | terminal serine protease) | | | |
| 1959 | codY transcriptional regulator | CodY [Bacillus licheniformis DSM 13] | UniRef100_Q65JN2 | Bacillus licheniformis DSM 13 |
| 1960 | flgB flagellar basal-body rod protein | FlgB [Bacillus licheniformis DSM 13] | UniRef100_Q65JN1 | Bacillus licheniformis DSM 13 |
| 1961 | flgC flagellar basal-body rod protein | FlgC [Bacillus licheniformis DSM 13] | UniRef100_Q65JN0 | Bacillus licheniformis DSM 13 |
| 1962 | fliE flagellar hook-basal body protein | FliE [Bacillus licheniformis DSM 13] | UniRef100_Q65JM9 | Bacillus licheniformis DSM 13 |
| 1963 | fliF flagellar basal-body M-ring protein | FliF [Bacillus licheniformis DSM 13] | UniRef100_Q65JM8 | Bacillus licheniformis DSM 13 |
| 1964 | fliG flagellar motor switch protein | FliG [Bacillus licheniformis DSM 13] | UniRef100_Q65JM7 | Bacillus licheniformis DSM 13 |
| 1965 | fliH flagellar assembly protein | FliH [Bacillus licheniformis DSM 13] | UniRef100_Q65JM6 | Bacillus licheniformis DSM 13 |
| 1966 | fliI flagellar-specific ATP synthase | FliI [Bacillus licheniformis DSM 13] | UniRef100_Q65JM5 | Bacillus licheniformis DSM 13 |
| 1967 | fliJ flagellar protein | FliJ [Bacillus licheniformis DSM 13] | UniRef100_Q65JM4 | Bacillus licheniformis DSM 13 |
| 1968 | ylxF Protein kinase PKN_PRK1, effector, Flagellar | YlxF [Bacillus licheniformis DSM 13] | UniRef100_Q65JM3 | Bacillus licheniformis DSM 13 |
| | motor switch protein FliG-like YlxF | | | |
| 1969 | fliK Flagellar protein FliK | Hypothetical protein flik [Bacillus licheniformis DSM 13] | UniRef100_Q65JM2 | Bacillus licheniformis DSM 13 |
| 1970 | ylxG Flagellar hook capping protein YlxG | YlxG [Bacillus licheniformis DSM 13] | UniRef100_Q65JM1 | Bacillus licheniformis DSM 13 |
| 1971 | flgE flagellar hook protein | FlgE [Bacillus licheniformis DSM 13] | UniRef100_Q65JM0 | Bacillus licheniformis DSM 13 |
| 1972 | BLP01894 hypothetical protein | Hypothetical protein [Bacillus licheniformis DSM 13] | UniRef100_Q65JL9 | Bacillus licheniformis DSM 13 |
| 1973 | fliL flagellar protein | FliL [Bacillus licheniformis DSM 13] | UniRef100_Q65JL8 | Bacillus licheniformis DSM 13 |
| 1974 | fliM flagellar motor switch protein | FliM [Bacillus licheniformis DSM 13] | UniRef100_Q65JL7 | Bacillus licheniformis DSM 13 |
| 1975 | fliY flagellar motor switch protein | FliY [Bacillus licheniformis DSM 13] | UniRef100_Q65JL6 | Bacillus licheniformis DSM 13 |
| 1976 | cheY two-component response regulator | CheY [Bacillus licheniformis DSM 13] | UniRef100_Q65JL5 | Bacillus licheniformis DSM 13 |
| 1977 | fliZ flagellar protein | FliZ [Bacillus licheniformis DSM 13] | UniRef100_Q65JL4 | Bacillus licheniformis DSM 13 |
| 1978 | fliP flagellar protein | FliP [Bacillus licheniformis DSM 13] | UniRef100_Q65JL3 | Bacillus licheniformis DSM 13 |
| 1979 | fliQ Flagellar biosynthetic protein FliQ | FliQ [Bacillus licheniformis DSM 13] | UniRef100_Q65JL2 | Bacillus licheniformis DSM 13 |
| 1980 | fliR flagellar protein | FliR [Bacillus licheniformis DSM 13] | UniRef100_Q65JL1 | Bacillus licheniformis DSM 13 |
| 1981 | flhB flagella-associated protein | FlhB [Bacillus licheniformis DSM 13] | UniRef100_Q65JL0 | Bacillus licheniformis DSM 13 |
| 1982 | flhA flagella-associated protein | FlhA [Bacillus licheniformis DSM 13] | UniRef100_Q65JK9 | Bacillus licheniformis DSM 13 |
| 1983 | flhF flagella-associated protein | FlhF [Bacillus licheniformis DSM 13] | UniRef100_Q65JK8 | Bacillus licheniformis DSM 13 |
| 1984 | ylxH conserved hypothetical ATPas YlxH | YlxH [Bacillus licheniformis DSM 13] | UniRef100_Q65JK7 | Bacillus licheniformis DSM 13 |
| 1985 | cheB methyl-accepting chemotaxis proteins (MCP)- | CheB (Methyl-accepting chemotaxis proteins (MCP)- | UniRef100_Q65JK6 | Bacillus licheniformis DSM 13 |
| | glutamate methylesterase and two-component | glutamate methylesterase and two-component response | | |
| | response regulator-like protein CheB | regulator-like) [Bacillus licheniformis DSM 13] | | |
| 1986 | cheA two-component sensor histidine kinase CheA | CheA [Bacillus licheniformis DSM 13] | UniRef100_Q65JK5 | Bacillus licheniformis DSM 13 |
| 1987 | cheW CheW chemotaxis protein | Hypothetical protein cheW [Bacillus licheniformis DSM 13] | UniRef100_Q65JK4 | Bacillus licheniformis DSM 13 |
| 1988 | cheC CheC chemotaxis protein | Hypothetical protein cheC [Bacillus licheniformis DSM 13] | UniRef100_Q65JK3 | Bacillus licheniformis DSM 13 |
| 1989 | cheD CheD chemotaxis protein | Hypothetical protein cheD [Bacillus licheniformis DSM 13] | UniRef100_Q65JK2 | Bacillus licheniformis DSM 13 |
| 1990 | sigD RNA polymerase sigma-28 factor (sigma-D) | SigD [Bacillus licheniformis DSM 13] | UniRef100_Q65JK1 | Bacillus licheniformis DSM 13 |
| 1991 | ylxL conserved hypothetical protein YlxL | YlxL [Bacillus licheniformis DSM 13] | UniRef100_Q65JK0 | Bacillus licheniformis DSM 13 |
| 1992 | rpsB ribosomal protein S2 | RpsB [Bacillus licheniformis DSM 13] | UniRef100_Q65JJ9 | Bacillus licheniformis DSM 13 |
| 1993 | tsf elongation factor Ts | Translation elongation factor Ts [Bacillus cereus] | UniRef100_Q65JJ8 | Bacillus cereus |
| 1994 | pyrH uridylate kinase | PyrH [Bacillus licheniformis DSM 13] | UniRef100_Q65JJ7 | Bacillus licheniformis DSM 13 |
| 1995 | frr ribosome recycling factor | Frr [Bacillus licheniformis DSM 13] | UniRef100_Q65JJ6 | Bacillus licheniformis DSM 13 |
| 1996 | uppS undecaprenyl pyrophosphate synthetase | UppS [Bacillus licheniformis DSM 13] | UniRef100_Q65JJ5 | Bacillus licheniformis DSM 13 |
| 1997 | cdsA phosphatidate cytidylyltransferase (CDP- | CdsA [Bacillus licheniformis DSM 13] | UniRef100_Q65JJ4 | Bacillus licheniformis DSM 13 |
| | diglyceride synthase) | | | |
| 1998 | dxr 1-deoxy-D-xylulose-5-phosphate | Dxr [Bacillus licheniformis DSM 13] | UniRef100_Q65JJ3 | Bacillus licheniformis DSM 13 |
| | reductoisomerase | | | |
| 1999 | yluC intramembrane zinc metallopeptidase YluC | YluC [Bacillus licheniformis DSM 13] | UniRef100_Q65JJ2 | Bacillus licheniformis DSM 13 |
| 2000 | proS prolyl-tRNA synthetase | ProS [Bacillus licheniformis DSM 13] | UniRef100_Q65JJ1 | Bacillus licheniformis DSM 13 |
| 2001 | polC DNA polymerase III (alpha subunit) | PolC [Bacillus licheniformis DSM 13] | UniRef100_Q65JJ0 | Bacillus licheniformis DSM 13 |
| 2002 | BLP01924 hypothetical protein | | | |
| 2003 | celA Glycoside Hydrolase Family 9 | Hypothetical protein [Bacillus licheniformis DSM 13] | UniRef100_Q65JI9 | Bacillus licheniformis DSM 13 |
| 2004 | celB Glycoside Hydrolase Family 48 | Hypothetical protein [Bacillus licheniformis DSM 13] | UniRef100_Q65JI8 | Bacillus licheniformis DSM 13 |
| 2005 | celC Glycoside Hydrolase Family 5 | Hypothetical protein [Bacillus licheniformis DSM 13] | UniRef100_Q65JI7 | Bacillus licheniformis DSM 13 |
| 2006 | celD Glycoside Hydrolase family 5 | Hypothetical protein [Bacillus licheniformis DSM 13] | UniRef100_Q65JI6 | Bacillus licheniformis DSM 13 |
| 2007 | BLP01929 hypothetical protein | | | |
| 2008 | BLP01930 conserved hypothetical protein | YlxS [Bacillus licheniformis DSM 13] | UniRef100_Q65JI5 | Bacillus licheniformis DSM 13 |
| 2009 | nusA NusA | Hypothetical protein nusA [Bacillus licheniformis DSM 13] | UniRef100_Q65JI4 | Bacillus licheniformis DSM 13 |
| 2010 | ylxR conserved hypothetical protein YlxR | YlxR [Bacillus licheniformis DSM 13] | UniRef100_Q65JI3 | Bacillus licheniformis DSM 13 |
| 2011 | BLP01932 Ribosomal protein | YlxQ [Bacillus licheniformis DSM 13] | UniRef100_Q65JI2 | Bacillus licheniformis DSM 13 |
| 2012 | infB initiation factor IF-2 | InfB [Bacillus licheniformis DSM 13] | UniRef100_Q65JI1 | Bacillus licheniformis DSM 13 |
| 2013 | BLP01934 hypothetical protein | YlxP [Bacillus licheniformis DSM 13] | UniRef100_Q65JI0 | Bacillus licheniformis DSM 13 |
| 2014 | rbfA ribosome-binding factor A | RbfA [Bacillus licheniformis DSM 13] | UniRef100_Q65JH9 | Bacillus licheniformis DSM 13 |
| 2015 | truB tRNA pseudouridine 55 synthase | TruB [Bacillus licheniformis DSM 13] | UniRef100_Q65JH8 | Bacillus licheniformis DSM 13 |
| 2016 | ribC riboflavin kinase and FAD synthase | RibC [Bacillus licheniformis DSM 13] | UniRef100_Q65JH7 | Bacillus licheniformis DSM 13 |
| 2017 | rpsO 30S ribosomal protein S15. RpsO | RpsO [Bacillus licheniformis DSM 13] | UniRef100_Q65JH6 | Bacillus licheniformis DSM 13 |
| 2018 | pnpA polynucleotide phosphorylase (PNPase) | PnpA [Bacillus licheniformis DSM 13] | UniRef100_Q65JH5 | Bacillus licheniformis DSM 13 |
| 2019 | ylxY Carbohydrate Esterase Family 4 protein, putative | Arginine repressor [Bacillus licheniformis DSM 13] | UniRef100_Q62UX9 | Bacillus licheniformis DSM 13 |
| | polysaccharide deacetylase YlxY | | | |
| 2020 | mlpA peptidase | MlpA [Bacillus licheniformis DSM 13] | UniRef100_Q65JH3 | Bacillus licheniformis DSM 13 |
| 2021 | ymxH hypothetical protein YmxH | YmxH [Bacillus licheniformis DSM 13] | UniRef100_Q65JH2 | Bacillus licheniformis DSM 13 |
| 2022 | BLP04730 hypothetical protein | | | |
| 2023 | spoVFA dipicolinate synthase subunit A | SpoVFA [Bacillus licheniformis DSM 13] | UniRef100_Q65JH1 | Bacillus licheniformis DSM 13 |
| 2024 | spoVFB dipicolinate synthase subunit B | SpoVFB [Bacillus licheniformis DSM 13] | UniRef100_Q65JH0 | Bacillus licheniformis DSM 13 |
| 2025 | asd aspartate-semialdehyde dehydrogenase | Asd [Bacillus licheniformis DSM 13] | UniRef100_Q65JG9 | Bacillus licheniformis DSM 13 |
| 2026 | dapG aspartokinase I (alpha and beta subunits) | DapG [Bacillus licheniformis DSM 13] | UniRef100_Q65JG8 | Bacillus licheniformis DSM 13 |
| 2027 | dapA dihydrodipicolinate synthase | Dihydrodipicolinate synthase [Bacillus licheniformis DSM 13] | UniRef100_Q62UX2 | Bacillus licheniformis DSM 13 |
| 2028 | ymfA putative RNase, metallo beta-lactamase | YmfA [Bacillus licheniformis DSM 13] | UniRef100_Q65JG6 | Bacillus licheniformis DSM 13 |
| | superfamily protein, YmfA | | | |
| 2029 | tepA translocation-enhancing protein | TepA [Bacillus licheniformis DSM 13] | UniRef100_Q65JG5 | Bacillus licheniformis DSM 13 |
| 2030 | BLP01949 conserved hypothetical protein | Hypothetical protein [Bacillus licheniformis DSM 13] | UniRef100_Q65JG4 | Bacillus licheniformis DSM 13 |
| 2031 | spoIIIE DNA translocase SpoIIIE | SpoIIIE [Bacillus licheniformis DSM 13] | UniRef100_Q65JG3 | Bacillus licheniformis DSM 13 |
| 2032 | ymfC transcriptional regulator YmfC | YmfC [Bacillus licheniformis DSM 13] | UniRef100_Q65JG2 | Bacillus licheniformis DSM 13 |
| 2033 | BLP01952 putative transporter | Hypothetical protein [Bacillus licheniformis DSM 13] | UniRef100_Q65JG1 | Bacillus licheniformis DSM 13 |
| 2034 | BLP01953 putative peptidase | Hypothetical protein [Bacillus licheniformis DSM 13] | UniRef100_Q65JG0 | Bacillus licheniformis DSM 13 |
| 2035 | ymfH putative metalloendopeptidase YmfH | YmfH [Bacillus licheniformis DSM 13] | UniRef100_Q65JF9 | Bacillus licheniformis DSM 13 |
| 2036 | ymfI putative oxidoreductase | YmfI [Bacillus licheniformis DSM 13] | UniRef100_Q65JF8 | Bacillus licheniformis DSM 13 |
| 2037 | ymfJ conserved hypothetical protein YmfJ | YmfJ [Bacillus licheniformis DSM 13] | UniRef100_Q65JF7 | Bacillus licheniformis DSM 13 |
| 2038 | BLP01957 hypothetical protein | | | |
| 2039 | ymfK hypothetical protein YmfK | Hypothetical protein [Bacillus licheniformis DSM 13] | UniRef100_Q65JF6 | Bacillus licheniformis DSM 13 |
| 2040 | ymfM putative DNA binding protein, transcriptional | Hypothetical protein [Bacillus licheniformis DSM 13] | UniRef100_Q65JF5 | Bacillus licheniformis DSM 13 |
| | regulator YmfM | | | |
| 2041 | pgsA phosphatidylglycerophosphate synthase | PgsA [Bacillus licheniformis DSM 13] | UniRef100_Q65JF4 | Bacillus licheniformis DSM 13 |
| 2042 | cinA competence-damage inducible protein | CinA [Bacillus licheniformis DSM 13] | UniRef100_Q65JF3 | Bacillus licheniformis DSM 13 |
| 2043 | recA multifunctional SOS repair regulator | RecA protein [Bacillus licheniformis] | UniRef100_P62211 | Bacillus licheniformis |
| 2044 | BLP01963 hypothetical protein | | | |
| 2045 | ymdA conserved hypothetical protein YmdA | YmdA [Bacillus licheniformis DSM 13] | UniRef100_Q65JF1 | Bacillus licheniformis DSM 13 |
| 2046 | ymdB Conserved hypothetical protein YmdB | YmdB [Bacillus licheniformis DSM 13] | UniRef100_Q65JF0 | Bacillus licheniformis DSM 13 |
| 2047 | spoVS SpoVS | Hypothetical protein spoVS [Bacillus licheniformis DSM 13] | UniRef100_Q65JE9 | Bacillus licheniformis DSM 13 |
| 2048 | BLP01967 hypothetical protein | | | |
| 2049 | BLP01968 putative dipeptidase family protein | Hypothetical protein [Bacillus licheniformis DSM 13] | UniRef100_Q65JE8 | Bacillus licheniformis DSM 13 |
| 2050 | tdh threonine 3-dehydrogenase | Tdh [Bacillus licheniformis DSM 13] | UniRef100_Q65JE7 | Bacillus licheniformis DSM 13 |
| 2051 | kbl 2-amino-3-ketobutyrate CoA ligase (glycine acetyl | Kbl [Bacillus licheniformis DSM 13] | UniRef100_Q65JE6 | Bacillus licheniformis DSM 13 |
| | transferase) | | | |
| 2052 | ymcB conserved hypothetical protein YmcB | YmcB [Bacillus licheniformis DSM 13] | UniRef100_Q65JE5 | Bacillus licheniformis DSM 13 |
| 2053 | ymcA conserved hypothetical protein YmcA | YmcA [Bacillus licheniformis DSM 13] | UniRef100_Q65JE4 | Bacillus licheniformis DSM 13 |
| 2054 | cotE morphogenic protein | CotE [Bacillus licheniformis DSM 13] | UniRef100_Q65JE3 | Bacillus licheniformis DSM 13 |
| 2055 | mutS MutS | MutS [Bacillus licheniformis DSM 13] | UniRef100_Q65JE2 | Bacillus licheniformis DSM 13 |
| 2056 | mutL MutL | Hypothetical protein mutL [Bacillus licheniformis DSM 13] | UniRef100_Q65JE1 | Bacillus licheniformis DSM 13 |
| 2057 | yjcS conserved protein YjcS | YjcS [Bacillus licheniformis DSM 13] | UniRef100_Q65JE0 | Bacillus licheniformis DSM 13 |
| 2058 | BLP01977 hypothetical protein | Hypothetical protein [Bacillus licheniformis DSM 13] | UniRef100_Q65JD9 | Bacillus licheniformis DSM 13 |
| 2059 | BLP04931 hypothetical protein | Hypothetical protein [Bacillus licheniformis DSM 13] | UniRef100_Q62UU2 | Bacillus licheniformis DSM 13 |
| 2060 | BLP01978 hypothetical protein | Hypothetical protein [Bacillus licheniformis DSM 13] | UniRef100_Q65JD8 | Bacillus licheniformis DSM 13 |
| 2061 | BLP01979 Cobalamin synthesis protein_P47K family | Hypothetical protein [Bacillus licheniformis DSM 13] | UniRef100_Q65JD7 | Bacillus licheniformis DSM 13 |
| | protein | | | |
| 2062 | BLP01980 hypothetical protein | NADH-ubiquinone oxidoreductase 51 kDa subunit [Bacillus | UniRef100_Q65JD6 | Bacillus licheniformis DSM 13 |
| | | licheniformis DSM 13] | | |
| 2063 | BLP01981 GCN5-related N-acetyltransferase | Hypothetical protein [Bacillus licheniformis DSM 13] | UniRef100_Q65JD5 | Bacillus licheniformis DSM 13 |
| 2064 | BLP01982 hypothetical protein | Hypothetical protein [Bacillus licheniformis DSM 13] | UniRef100_Q65JD4 | Bacillus licheniformis DSM 13 |
| 2065 | BLP01983 conserved hypothetical protein | | | |
| 2066 | yobN YobN | Putative L-amino acid oxidase [Bacillus subtilis] | UniRef100_O34363 | Bacillus subtilis |
| 2067 | BLP01985 hypothetical protein | | | |
| 2068 | yoaK conserved membrane protein YoaK | YoaK [Bacillus licheniformis DSM 13] | UniRef100_Q65JD1 | Bacillus licheniformis DSM 13 |
| 2069 | BLP01987 pH regulator, solute hydrogen antiporter | Hypothetical protein [Bacillus licheniformis DSM 13] | UniRef100_Q65JD0 | Bacillus licheniformis DSM 13 |
| 2070 | BLP01988 hypothetical protein | Tetracycline resistance protein [Bacillus subtilis] | UniRef100_P23054 | Bacillus subtilis |
| 2071 | BLP01989 conserved hypothetical protein | Hypothetical protein [Bacillus licheniformis DSM 13] | UniRef100_Q65JC6 | Bacillus licheniformis DSM 13 |
| 2072 | BLP01990 hypothetical protein | | | |
| 2073 | BLP01991 conserved hypothetical protein | | | |
| 2074 | yqeD conserved hypothetical protein YqeD | YqeD [Bacillus licheniformis DSM 13] | UniRef100_Q65JC4 | Bacillus licheniformis DSM 13 |
| 2075 | BLP01993 penicillin-binding protein | Hypothetical protein [Bacillus licheniformis DSM 13] | UniRef100_Q65JC3 | Bacillus licheniformis DSM 13 |
| 2076 | BLP04731 hypothetical protein | | | |
| 2077 | yjiC Glycosyl transferase Family 1 | YjiC [Bacillus licheniformis DSM 13] | UniRef100_Q65JC2 | Bacillus licheniformis DSM 13 |
| 2078 | yveA Amino acid_polyamine transporter I | YveA [Bacillus licheniformis DSM 13] | UniRef100_Q65JC1 | Bacillus licheniformis DSM 13 |
| 2079 | yraD YraD | Hypothetical protein yraD [Bacillus licheniformis DSM 13] | UniRef100_Q65JC0 | Bacillus licheniformis DSM 13 |
| 2080 | yraE YraE | Hypothetical protein yraG [Bacillus licheniformis DSM 13] | UniRef100_Q62US7 | Bacillus licheniformis DSM 13 |
| 2081 | ydhD Glycoside hydrolase, family 18 | Hypothetical protein [Bacillus licheniformis DSM 13] | UniRef100_Q65JB8 | Bacillus licheniformis DSM 13 |
| 2082 | yezE probable transcriptional regulator (TetR family) | YezE [Bacillus licheniformis DSM 13] | UniRef100_Q65JB7 | Bacillus licheniformis DSM 13 |
| 2083 | BLP02000 hypothetical protein | | | |
| 2084 | yesE conserved protein YesE | Hypothetical protein yesE [Bacillus licheniformis DSM 13] | UniRef100_Q65JB6 | Bacillus licheniformis DSM 13 |
| 2085 | yesF conserved protein YesF | Hypothetical protein yesF [Bacillus licheniformis DSM 13] | UniRef100_Q65JB5 | Bacillus licheniformis DSM 13 |
| 2086 | BLP02003 conserved hypothetical protein | Hypothetical protein [Bacillus licheniformis DSM 13] | UniRef100_Q65JB4 | Bacillus licheniformis DSM 13 |
| 2087 | ymaD conserved protein YmaD | YmaD [Bacillus licheniformis DSM 13] | UniRef100_Q65JB3 | Bacillus licheniformis DSM 13 |
| 2088 | ebrB multidrug resistance protein EbrB | EbrB [Bacillus licheniformis DSM 13] | UniRef100_Q65JB2 | Bacillus licheniformis DSM 13 |
| 2089 | ebrA multidrug resistance protein EbrA | EbrA [Bacillus licheniformis DSM 13] | UniRef100_Q65JB1 | Bacillus licheniformis DSM 13 |
| 2090 | BLP02007 hypothetical protein | Hypothetical protein [Bacillus licheniformis DSM 13] | UniRef100_Q62UR8 | Bacillus licheniformis DSM 13 |
| 2091 | ymaF conserved hypothetical protein YmaF | Hypothetical protein [Bacillus licheniformis DSM 13] | UniRef100_Q62UR7 | Bacillus licheniformis DSM 13 |
| 2092 | miaA tRNA isopentenylpyrophosphate transferase | MiaA [Bacillus licheniformis DSM 13] | UniRef100_Q65JA9 | Bacillus licheniformis DSM 13 |
| | MiaA | | | |
| 2093 | hfq host factor-1 protein Hfq | YmaH [Bacillus licheniformis DSM 13] | UniRef100_Q65JA8 | Bacillus licheniformis DSM 13 |
| 2094 | BLP04732 hypothetical protein | | | |
| 2095 | ymzA conserved hypothetical protein YmzA | YmzA [Bacillus licheniformis DSM 13] | UniRef100_Q65JA7 | Bacillus licheniformis DSM 13 |
| 2096 | nrdl Nrdl | YmaA [Bacillus licheniformis DSM 13] | UniRef100_Q65JA6 | Bacillus licheniformis DSM 13 |
| 2097 | nrdE NrdE Ribonucleoside-diphosphate reductase | NrdE [Bacillus licheniformis DSM 13] | UniRef100_Q65JA5 | Bacillus licheniformis DSM 13 |
| | alpha subunit | | | |
| 2098 | nrdF NrdF ribonucleoside-diphosphate reductase beta | NrdF [Bacillus licheniformis DSM 13] | UniRef100_Q65JA4 | Bacillus licheniformis DSM 13 |
| | subunit | | | |
| 2099 | ymaB conserved protein YmaB | Hypothetical protein ymaB [Bacillus licheniformis DSM 13] | UniRef100_Q65JA3 | Bacillus licheniformis DSM 13 |
| 2100 | BLP02016 putative hydrolase | Hypothetical protein [Bacillus licheniformis DSM 13] | UniRef100_Q65JA2 | Bacillus licheniformis DSM 13 |
| 2101 | nifU Fe—S cluster formation protein | Hypothetical protein [Bacillus licheniformis DSM 13] | UniRef100_Q65JA1 | Bacillus licheniformis DSM 13 |
| 2102 | BLP02018 putative transcriptional regulator | Transcriptional regulator [Bacillus licheniformis DSM 13] | UniRef100_Q62UQ7 | Bacillus licheniformis DSM 13 |
| 2103 | ydhC probable transcriptional regulator YdhC | Hypothetical protein [Bacillus licheniformis DSM 13] | UniRef100_Q65J99 | Bacillus licheniformis DSM 13 |
| 2104 | yjlA conserved membrane protein YjlA | Hypothetical protein yjlA [Bacillus licheniformis DSM 13] | UniRef100_Q65J98 | Bacillus licheniformis DSM 13 |
| 2105 | cwlC N-acetylmuramoyl-L-alanine amidase | CwlC [Bacillus licheniformis DSM 13] | UniRef100_Q65J97 | Bacillus licheniformis DSM 13 |
| 2106 | BLP02022 hypothetical protein | | | |
| 2107 | BLP02023 conserved hypothetical membrane protein | Hypothetical protein [Bacillus licheniformis DSM 13] | UniRef100_Q65J96 | Bacillus licheniformis DSM 13 |
| 2108 | BLP02024 conserved hypothetical protein | Hypothetical protein [Bacillus licheniformis DSM 13] | UniRef100_Q65J95 | Bacillus licheniformis DSM 13 |
| 2109 | BLP04932 conserved hypothetical protein | Hypothetical protein [Bacillus licheniformis DSM 13] | UniRef100_Q65J94 | Bacillus licheniformis DSM 13 |
| 2110 | BLP02025 hypothetical protein | Hypothetical protein [Bacillus licheniformis DSM 13] | UniRef100_Q62UQ1 | Bacillus licheniformis DSM 13 |
| 2111 | BLP02026 hypothetical protein | Hypothetical protein [Bacillus licheniformis DSM 13] | UniRef100_Q65J93 | Bacillus licheniformis DSM 13 |
| 2112 | ydgC possible transcriptional regulator YdgC | Hypothetical protein [Bacillus licheniformis DSM 13] | UniRef100_Q65J92 | Bacillus licheniformis DSM 13 |
| 2113 | BLP02028 hypothetical protein | Hypothetical protein [Bacillus licheniformis DSM 13] | UniRef100_Q65J91 | Bacillus licheniformis DSM 13 |
| 2114 | pucI Permease for cytosine_purines, uracil, thiamine, | Hypothetical protein [Bacillus licheniformis DSM 13] | UniRef100_Q65J90 | Bacillus licheniformis DSM 13 |
| | allantoin | | | |
| 2115 | BLP02030 Hydantoin utilization protein A | Hypothetical protein [Bacillus licheniformis DSM 13] | UniRef100_Q65J89 | Bacillus licheniformis DSM 13 |
| 2116 | BLP02031 N-methylhydantoinase B | Hypothetical protein [Bacillus licheniformis DSM 13] | UniRef100_Q65J88 | Bacillus licheniformis DSM 13 |
| 2117 | BLP02032 Hydantoin Utilization protein B | Hypothetical protein [Bacillus licheniformis DSM 13] | UniRef100_Q65J87 | Bacillus licheniformis DSM 13 |
| 2118 | BLP02033 hypothetical protein | Hypothetical protein [Bacillus licheniformis DSM 13] | UniRef100_Q65J86 | Bacillus licheniformis DSM 13 |
| 2119 | BLP02034 hypothetical protein | | | |
| 2120 | BLP02035 hypothetical protein | | | |
| 2121 | BLP02036 hypothetical protein | | | |
| 2122 | BLP02037 conserved hypothetical protein | Hypothetical protein [Bacillus licheniformis DSM 13] | UniRef100_Q65J85 | Bacillus licheniformis DSM 13 |
| 2123 | BLP04933 hypothetical protein | Hypothetical protein [Bacillus licheniformis DSM 13] | UniRef100_Q62UP1 | Bacillus licheniformis DSM 13 |
| 2124 | BLP02038 hypothetical protein | | | |
| 2125 | BLP02039 hypothetical protein | Hypothetical protein [Bacillus licheniformis DSM 13] | UniRef100_Q62UP0 | Bacillus licheniformis DSM 13 |
| 2126 | spoVK SpoVK | Hypothetical protein spoVK [Bacillus licheniformis DSM 13] | UniRef100_Q65J83 | Bacillus licheniformis DSM 13 |
| 2127 | ynbA GTP-binding protein YnbA | YnbA [Bacillus licheniformis DSM 13] | UniRef100_Q65J82 | Bacillus licheniformis DSM 13 |
| 2128 | ynbB conserved hypothetical protein YnbB | YnbB [Bacillus licheniformis DSM 13] | UniRef100_Q65J81 | Bacillus licheniformis DSM 13 |
| 2129 | glnR transcriptional regulator | GlnR [Bacillus licheniformis DSM 13] | UniRef100_Q65J80 | Bacillus licheniformis DSM 13 |
| 2130 | glnA glutamine synthetase | GlnA [Bacillus licheniformis DSM 13] | UniRef100_Q65J79 | Bacillus licheniformis DSM 13 |
| 2131 | BLP02045 conserved hypothetical protein | Hypothetical protein [Bacillus licheniformis DSM 13] | UniRef100_Q65J78 | Bacillus licheniformis DSM 13 |
| 2132 | BLP04819 hypothetical protein | Hypothetical protein [Bacillus licheniformis DSM 13] | UniRef100_Q62UN4 | Bacillus licheniformis DSM 13 |
| 2133 | BLP02046 hypothetical protein | Hypothetical protein [Bacillus licheniformis DSM 13] | UniRef100_Q65J77 | Bacillus licheniformis DSM 13 |
| 2134 | BLP02047 hypothetical protein | Hypothetical protein [Bacillus licheniformis DSM 13] | UniRef100_Q65J76 | Bacillus licheniformis DSM 13 |
| 2135 | BLP04862 conserved hypothetical protein | Hypothetical protein [Bacillus licheniformis DSM 13] | UniRef100_Q65J75 | Bacillus licheniformis DSM 13 |
| 2136 | BLP04863 conserved putative histidine triad (HIT) | Hypothetical protein [Bacillus licheniformis DSM 13] | UniRef100_Q65J74 | Bacillus licheniformis DSM 13 |
| | protein | | | |
| 2137 | BLP04820 hypothetical protein | Hypothetical protein [Bacillus licheniformis DSM 13] | UniRef100_Q65J73 | Bacillus licheniformis DSM 13 |
| 2138 | ydjC YdjC | Hypothetical protein [Bacillus licheniformis DSM 13] | UniRef100_Q65J72 | Bacillus licheniformis DSM 13 |
| 2139 | BLP02049 hypothetical protein | Hypothetical protein [Bacillus licheniformis DSM 13] | UniRef100_Q65J71 | Bacillus licheniformis DSM 13 |
| 2140 | BLP02050 hypothetical protein | Hypothetical protein [Bacillus licheniformis DSM 13] | UniRef100_Q65J70 | Bacillus licheniformis DSM 13 |
| 2141 | BLP02051 hypothetical protein | Hypothetical protein [Bacillus licheniformis DSM 13] | UniRef100_Q65J69 | Bacillus licheniformis DSM 13 |
| 2142 | yoaO YoaO | YoaO [Bacillus licheniformis DSM 13] | UniRef100_Q65J68 | Bacillus licheniformis DSM 13 |
| 2143 | BLP02053 hypothetical protein | Hypothetical protein [Bacillus licheniformis DSM 13] | UniRef100_Q65J67 | Bacillus licheniformis DSM 13 |
| 2144 | BLP02054 conserved hypothetical | Hypothetical protein [Bacillus licheniformis DSM 13] | UniRef100_Q65J66 | Bacillus licheniformis DSM 13 |
| 2145 | BLP04934 hypothetical protein | Hypothetical protein [Bacillus licheniformis DSM 13] | UniRef100_Q65J65 | Bacillus licheniformis DSM 13 |
| 2146 | BLP02055 hypothetical phage-related protein | Hypothetical protein [Bacillus licheniformis DSM 13] | UniRef100_Q65J64 | Bacillus licheniformis DSM 13 |
| 2147 | BLP02056 hypothetical protein | | | |
| 2148 | BLP02057 hypothetical protein | | | |
| 2149 | yvdT probable transcriptional regulator YvdT | YvdT [Bacillus licheniformis DSM 13] | UniRef100_Q65J63 | Bacillus licheniformis DSM 13 |
| 2150 | yvdS SMR-type multidrug efflux transporter | YvdS [Bacillus licheniformis DSM 13] | UniRef100_Q65J62 | Bacillus licheniformis DSM 13 |
| 2151 | yvdR SMR-type multidrug efflux transporter | YvdR [Bacillus licheniformis DSM 13] | UniRef100_Q65J61 | Bacillus licheniformis DSM 13 |
| 2152 | BLP02061 GCN5-related N-acetyltransferase | Hypothetical protein [Bacillus licheniformis DSM 13] | UniRef100_Q65J60 | Bacillus licheniformis DSM 13 |
| 2153 | BLP02062 conserved hypothetical protein | Hypothetical protein [Bacillus licheniformis DSM 13] | UniRef100_Q65J59 | Bacillus licheniformis DSM 13 |
| 2154 | yoaW YoaW | Hypothetical protein yoaW [Bacillus licheniformis DSM 13] | UniRef100_Q65J58 | Bacillus licheniformis DSM 13 |
| 2155 | BLP02064 hypothetical protein | | | |
| 2156 | ydbDA putative catalase YdbDA | Hypothetical protein [Bacillus licheniformis DSM 13] | UniRef100_Q65J56 | Bacillus licheniformis DSM 13 |
| 2157 | BLP02066 conservd hypothetical protein | Hypothetical protein [Bacillus licheniformis DSM 13] | UniRef100_Q65J55 | Bacillus licheniformis DSM 13 |
| 2158 | BLP02067 GCN5-related N-acetyltransferase | Hypothetical protein [Bacillus licheniformis DSM 13] | UniRef100_Q65J54 | Bacillus licheniformis DSM 13 |
| 2159 | BLP02068 conserved hypothetical protein | Hypothetical protein [Bacillus licheniformis DSM 13] | UniRef100_Q65J53 | Bacillus licheniformis DSM 13 |
| 2160 | BLP02069 putative transcriptional regulator | Hypothetical protein [Bacillus licheniformis DSM 13] | UniRef100_Q65J52 | Bacillus licheniformis DSM 13 |
| 2161 | BLP02070 putative transcriptional regulator | Hypothetical protein [Bacillus licheniformis DSM 13] | UniRef100_Q65J51 | Bacillus licheniformis DSM 13 |
| 2162 | ydfN putative oxidoreductase YdfN | YdfN [Bacillus licheniformis DSM 13] | UniRef100_Q65J50 | Bacillus licheniformis DSM 13 |
| 2163 | ydfO Glyoxalase domain protein YdfO | YdfO [Bacillus licheniformis DSM 13] | UniRef100_Q65J49 | Bacillus licheniformis DSM 13 |
| 2164 | ywrF conserved protein YwrF | YwrF [Bacillus licheniformis DSM 13] | UniRef100_Q65J48 | Bacillus licheniformis DSM 13 |
| 2165 | wrbA Trp repressor binding protein, putative | Hypothetical protein [Bacillus licheniformis DSM 13] | UniRef100_Q65J47 | Bacillus licheniformis DSM 13 |
| 2166 | BLP02075 hypothetical protein | | | |
| 2167 | BLP02076 phage-like protein | Hypothetical protein [Bacillus licheniformis DSM 13] | UniRef100_Q65J46 | Bacillus licheniformis DSM 13 |
| 2168 | BLP02077 conserved ypothetical protein | Hypothetical protein [Bacillus licheniformis DSM 13] | UniRef100_Q65J45 | Bacillus licheniformis DSM 13 |
| 2169 | thyA Thymidylate synthase A | Thymidylate synthase A [Bacillus licheniformis] | UniRef100_Q59212 | Bacillus licheniformis |
| 2170 | nucB nuclease | NucB [Bacillus licheniformis DSM 13] | UniRef100_Q65J43 | Bacillus licheniformis DSM 13 |
| 2171 | BLP02080 hypothetical protein | | | |
| 2172 | lexA transcriptional regulator | LexA [Bacillus licheniformis DSM 13] | UniRef100_Q65J42 | Bacillus licheniformis DSM 13 |
| 2173 | yneA Peptidoglycan-binding protein YneA | YneA [Bacillus licheniformis DSM 13] | UniRef100_Q65J41 | Bacillus licheniformis DSM 13 |
| 2174 | yneB Resolvase, N-terminal domain-putative | YneB [Bacillus licheniformis DSM 13] | UniRef100_Q65J40 | Bacillus licheniformis DSM 13 |
| | recombinase YneB | | | |
| 2175 | ynzC conserved protein YnzC | Hypothetical protein ynzC [Bacillus licheniformis DSM 13] | UniRef100_Q65J39 | Bacillus licheniformis DSM 13 |
| 2176 | tkt transketolase | Tkt [Bacillus licheniformis DSM 13] | UniRef100_Q65J38 | Bacillus licheniformis DSM 13 |
| 2177 | yneE conserved hypothetical protein YneE | YneE [Bacillus licheniformis DSM 13] | UniRef100_Q65J37 | Bacillus licheniformis DSM 13 |
| 2178 | yneF conserved hypothetical protein YneF | YneF [Bacillus licheniformis DSM 13] | UniRef100_Q65J36 | Bacillus licheniformis DSM 13 |
| 2179 | ynzD YnzD | YnzD [Bacillus licheniformis DSM 13] | UniRef100_Q65J35 | Bacillus licheniformis DSM 13 |
| 2180 | ccdA integral membrane protein cytochrome | CcdA [Bacillus licheniformis DSM 13] | UniRef100_Q65J34 | Bacillus licheniformis DSM 13 |
| | biogenesis protein CcdA | | | |
| 2181 | ccdB putative two-component response regulator | YneI [Bacillus licheniformis DSM 13] | UniRef100_Q65J33 | Bacillus licheniformis DSM 13 |
| 2182 | ccdC conserved membrane protein CcdC | YneJ [Bacillus licheniformis DSM 13] | UniRef100_Q65J32 | Bacillus licheniformis DSM 13 |
| 2183 | yneK conserved protein YneK | Hypothetical protein yneK [Bacillus licheniformis DSM 13] | UniRef100_Q65J31 | Bacillus licheniformis DSM 13 |
| 2184 | cotM spore coat protein (outer) | CotM [Bacillus licheniformis DSM 13] | UniRef100_Q65J30 | Bacillus licheniformis DSM 13 |
| 2185 | sspP small acid-soluble spore protein | SspP [Bacillus licheniformis DSM 13] | UniRef100_Q65J29 | Bacillus licheniformis DSM 13 |
| 2186 | sspO small acid-soluble spore protein | SspO [Bacillus licheniformis DSM 13] | UniRef100_Q65J28 | Bacillus licheniformis DSM 13 |
| 2187 | citB aconitate hydratase (aconitase) | CitB [Bacillus licheniformis DSM 13] | UniRef100_Q65J27 | Bacillus licheniformis DSM 13 |
| 2188 | yneN putative thiol:disulfide interchange protein YneN | YneN [Bacillus licheniformis DSM 13] | UniRef100_Q65J26 | Bacillus licheniformis DSM 13 |
| 2189 | BLP02098 hypothetical protein | Hypothetical protein [Bacillus licheniformis DSM 13] | UniRef100_Q65J25 | Bacillus licheniformis DSM 13 |
| 2190 | sspN small acid-soluble spore protein | SspN [Bacillus licheniformis DSM 13] | UniRef100_Q65J24 | Bacillus licheniformis DSM 13 |
| 2191 | tlp small acid-soluble spore protein (thioredoxin-like | Tlp [Bacillus licheniformis DSM 13] | UniRef100_Q65J23 | Bacillus licheniformis DSM 13 |
| | protein) | | | |
| 2192 | yneP putative thioesterase YneP | YneP [Bacillus licheniformis DSM 13] | UniRef100_Q65J22 | Bacillus licheniformis DSM 13 |
| 2193 | yneQ conserved protein YneQ | Hypothetical protein yneQ [Bacillus licheniformis DSM 13] | UniRef100_Q65J21 | Bacillus licheniformis DSM 13 |
| 2194 | BLP02103 hypothetical protein | | | |
| 2195 | BLP02104 conserved hypothetical protein | Hypothetical protein [Bacillus licheniformis DSM 13] | UniRef100_Q65J20 | Bacillus licheniformis DSM 13 |
| 2196 | BLP04733 hypothetical protein | | | |
| 2197 | BLP02105 conserved hypothetical membrane protein | Hypothetical protein [Bacillus licheniformis DSM 13] | UniRef100_Q65J19 | Bacillus licheniformis DSM 13 |
| 2198 | BLP02106 hypothetical protein | | | |
| 2199 | yneR conserved protein YneR | YneR [Bacillus licheniformis DSM 13] | UniRef100_Q65J18 | Bacillus licheniformis DSM 13 |
| 2200 | yneS conserved membrane protein YneS | Hypothetical protein yneS [Bacillus licheniformis DSM 13] | UniRef100_Q65J17 | Bacillus licheniformis DSM 13 |
| 2201 | yneT conserved protein YneT | YneT [Bacillus licheniformis DSM 13] | UniRef100_Q65J16 | Bacillus licheniformis DSM 13 |
| 2202 | parE subunit of DNA topoisomerase IV | ParE [Bacillus licheniformis DSM 13] | UniRef100_Q65J15 | Bacillus licheniformis DSM 13 |
| 2203 | parC subunit of DNA topoisomerase IV | ParC [Bacillus licheniformis DSM 13] | UniRef100_Q65J14 | Bacillus licheniformis DSM 13 |
| 2204 | BLP04734 hypothetical protein | | | |
| 2205 | BLP04735 hypothetical protein | | | |
| 2206 | araR transcriptional regulator (LacI family) AraR | AraR [Bacillus licheniformis DSM 13] | UniRef100_Q65J13 | Bacillus licheniformis DSM 13 |
| 2207 | BLP02113 Sugar kinase, possible xylulose kinase | Hypothetical protein [Bacillus licheniformis DSM 13] | UniRef100_Q65J12 | Bacillus licheniformis DSM 13 |
| 2208 | araDA L-ribulose-5-phosphate 4-epimerase | Hypothetical protein [Bacillus licheniformis DSM 13] | UniRef100_Q65J11 | Bacillus licheniformis DSM 13 |
| 2209 | BLP02115 L-arabinose isomerase | Hypothetical protein [Bacillus licheniformis DSM 13] | UniRef100_Q65J10 | Bacillus licheniformis DSM 13 |
| 2210 | BLP02116 Arabinose transport protein | Hypothetical protein [Bacillus licheniformis DSM 13] | UniRef100_Q65J09 | Bacillus licheniformis DSM 13 |
| 2211 | BLP02117 hypothetical protein | | | |
| 2212 | BLP02118 putative beta-ketoacyl-acyl carrier protein | Hypothetical protein [Bacillus licheniformis DSM 13] | UniRef100_Q65J08 | Bacillus licheniformis DSM 13 |
| | reductase | | | |
| 2213 | BLP02019 conserved hypothetical protein | Hypothetical protein [Bacillus licheniformis DSM 13] | UniRef100_Q65J07 | Bacillus licheniformis DSM 13 |
| 2214 | ynfC YfnC | Hypothetical protein ynfC [Bacillus licheniformis DSM 13] | UniRef100_Q65J06 | Bacillus licheniformis DSM 13 |
| 2215 | alsT amino acid carrier protein | AlsT [Bacillus licheniformis DSM 13] | UniRef100_Q65J05 | Bacillus licheniformis DSM 13 |
| 2216 | BLP02122 conserved hypothetical protein | Hypothetical protein [Bacillus licheniformis DSM 13] | UniRef100_Q65J04 | Bacillus licheniformis DSM 13 |
| 2217 | narI nitrate reductase (gamma subunit) | NarI [Bacillus licheniformis DSM 13] | UniRef100_Q65J03 | Bacillus licheniformis DSM 13 |
| 2218 | narJ nitrate reductase (protein J) | NarJ [Bacillus licheniformis DSM 13] | UniRef100_Q65J02 | Bacillus licheniformis DSM 13 |
| 2219 | narH nitrate reductase (beta subunit) | Nitrate reductase beta-subunit [Bacillus licheniformis] | UniRef100_Q65J01 | Bacillus licheniformis |
| 2220 | narG nitrate reductase (alpha subunit) | NarG [Bacillus licheniformis DSM 13] | UniRef100_Q65J00 | Bacillus licheniformis DSM 13 |
| 2221 | BLP02127 hypothetical protein | | | |
| 2222 | BLP02129 conserved hypothetical protein | Hypothetical protein [Bacillus licheniformis DSM 13] | UniRef100_Q65IZ9 | Bacillus licheniformis DSM 13 |
| 2223 | BLP02130 hypothetical protein | Hypothetical protein [Bacillus licheniformis DSM 13] | UniRef100_Q65IZ8 | Bacillus licheniformis DSM 13 |
| 2224 | BLP02131 Coenzyme PQQ synthesis protein, | MoaA/nifB/pqqE family [Bacillus licheniformis DSM 13] | UniRef100_Q65IZ7 | Bacillus licheniformis DSM 13 |
| | putative | | | |
| 2225 | BLP02132 hypothetical protein | | | |
| 2226 | arfM probable transcriptional regulator | ArfM [Bacillus licheniformis DSM 13] | UniRef100_Q65IZ6 | Bacillus licheniformis DSM 13 |
| 2227 | ywiC conserved membrane protein, putative carboxy | YwiC [Bacillus licheniformis DSM 13] | UniRef100_Q65IZ5 | Bacillus licheniformis DSM 13 |
| | peptidase YwiC | | | |
| 2228 | fnr transcriptional regulator Fnr | FNR protein [Bacillus licheniformis] | UniRef100_O86128 | Bacillus licheniformis |
| 2229 | narK nitrite extrusion protein | NarK [Bacillus licheniformis DSM 13] | UniRef100_Q65IZ3 | Bacillus licheniformis DSM 13 |
| 2230 | BLP04736 hypothetical protein | | | |
| 2231 | BLP02137 conserved hypothetical protein | Hypothetical protein [Bacillus licheniformis DSM 13] | UniRef100_Q65IZ2 | Bacillus licheniformis DSM 13 |
| 2232 | BLP02138 transcriptional regulator Fnr_Crp family | Hypothetical protein [Bacillus licheniformis DSM 13] | UniRef100_Q65IZ1 | Bacillus licheniformis DSM 13 |
| 2233 | BLP02139 Nitric oxide reductase cytochrome b | Hypothetical protein [Bacillus licheniformis DSM 13] | UniRef100_Q65IZ0 | Bacillus licheniformis DSM 13 |
| | subunit | | | |
| 2234 | scdA putative ScdA | Hypothetical protein [Bacillus licheniformis DSM 13] | UniRef100_Q65IY9 | Bacillus licheniformis DSM 13 |
| 2235 | fenH FenH | Hypothetical protein yngL [Bacillus licheniformis DSM 13] | UniRef100_Q65IY8 | Bacillus licheniformis DSM 13 |
| 2236 | BLP02142 hypothetical protein | | | |
| 2237 | bglC endo-1,4-beta-glucanase, Glycoside hydrolase | Cel5A [Bacillus licheniformis] | UniRef100_Q7X3S6 | Bacillus licheniformis |
| | Family 5 | | | |
| 2238 | ynfE putative acetyl transferase YfnE | Hypothetical protein ynfE [Bacillus licheniformis DSM 13] | UniRef100_Q62UE5 | Bacillus licheniformis DSM 13 |
| 2239 | ykkB GCN5-related N-acetyltransferase YkkB | YkkB [Bacillus licheniformis DSM 13] | UniRef100_Q65IY5 | Bacillus licheniformis DSM 13 |
| 2240 | BLP02146 putative transcriptional regulator | | | |
| 2241 | BLP02148 putative transporter | Quinolone resistence NorA protein, major facilitator family | UniRef100_Q6HN29 | Bacillus thuringiensis |
| | | transporter [Bacillus thuringiensis] | | |
| 2242 | ywoF Polysaccharide Lyase Family 9, YwoF | YwoF [Bacillus licheniformis DSM 13] | UniRef100_Q65IY0 | Bacillus licheniformis DSM 13 |
| 2243 | bmQ branched-chain amino acid transporter | BmQ [Bacillus licheniformis DSM 13] | UniRef100_Q65IX9 | Bacillus licheniformis DSM 13 |
| 2244 | adhA NADP-dependent alcohol dehydrogenase | AdhA [Bacillus licheniformis DSM 13] | UniRef100_Q65IX8 | Bacillus licheniformis DSM 13 |
| 2245 | yraB Putative DNA binding | Hypothetical protein [Bacillus licheniformis DSM 13] | UniRef100_Q65IX7 | Bacillus licheniformis DSM 13 |
| 2246 | BLP02153 PTS phosophotransferase | Hypothetical protein [Bacillus licheniformis DSM 13] | UniRef100_Q65IX6 | Bacillus licheniformis DSM 13 |
| 2247 | BLP02154 conserved hypothetical protein | Hypothetical protein [Bacillus licheniformis DSM 13] | UniRef100_Q65IX5 | Bacillus licheniformis DSM 13 |
| 2248 | BLP02155 hypothetical protein | Hypothetical protein [Bacillus licheniformis DSM 13] | UniRef100_Q65IX4 | Bacillus licheniformis DSM 13 |
| 2249 | BLP02156 Enoyl-CoA hydratase_isomerase | Hypothetical protein [Bacillus licheniformis DSM 13] | UniRef100_Q65IX3 | Bacillus licheniformis DSM 13 |
| 2250 | BLP02157 Enoyl-CoA hydratase_isomerase | Hypothetical protein [Bacillus licheniformis DSM 13] | UniRef100_Q65IX2 | Bacillus licheniformis DSM 13 |
| 2251 | mmsA methylmalonate-semialdehyde dehydrogenase | MmsA [Bacillus licheniformis DSM 13] | UniRef100_Q65IX1 | Bacillus licheniformis DSM 13 |
| | MmsA | | | |
| 2252 | ykwC 3-hydroxyisobutyrate dehydrogenase | Hypothetical protein [Bacillus licheniformis DSM 13] | UniRef100_Q65IX0 | Bacillus licheniformis DSM 13 |
| 2253 | BLP02160 Acyl-CoA dehydrogenase | Hypothetical protein [Bacillus licheniformis DSM 13] | UniRef100_Q65IW9 | Bacillus licheniformis DSM 13 |
| 2254 | BLP02161 hypothetical protein | | | |
| 2255 | BLP02162 hypothetical protein | | | |
| 2256 | manA mannose-6-phosphate isomerase | ManA [Bacillus licheniformis DSM 13] | UniRef100_Q65IW8 | Bacillus licheniformis DSM 13 |
| 2257 | manP phosphotransferase system (PTS) mannose- | ManP t (Phosphotransferase system (PTS) mannose-specific | UniRef100_Q65IW7 | Bacillus licheniformis DSM 13 |
| | specific enzyme IIBCA component | enzyme IIBCA component) [Bacillus licheniformis DSM 13] | | |
| 2258 | BLP04737 hypothetical protein | | | |
| 2259 | BLP04935 hypothetical protein | Hypothetical protein [Bacillus licheniformis DSM 13] | UniRef100_Q65IW6 | Bacillus licheniformis DSM 13 |
| 2260 | BLP02165 hypothetical protein | Hypothetical protein [Bacillus licheniformis DSM 13] | UniRef100_Q62UC5 | Bacillus licheniformis DSM 13 |
| 2261 | BLP04864 conserved hypothetical protein | Hypothetical protein [Bacillus licheniformis DSM 13] | UniRef100_Q62UC4 | Bacillus licheniformis DSM 13 |
| 2262 | manR transcriptional regulator | ManR [Bacillus licheniformis DSM 13] | UniRef100_Q65IW5 | Bacillus licheniformis DSM 13 |
| 2263 | BLP04738 hypothetical protein | | | |
| 2264 | BLP02167 conserved hypothetical protein | Hypothetical protein [Bacillus licheniformis DSM 13] | UniRef100_Q65IW4 | Bacillus licheniformis DSM 13 |
| 2265 | BLP02168 ABC transporter | Hypothetical protein [Bacillus licheniformis DSM 13] | UniRef100_Q65IW3 | Bacillus licheniformis DSM 13 |
| 2266 | BLP02169 putative transcriptional regulator, GntR | Hypothetical protein [Bacillus licheniformis DSM 13] | UniRef100_Q65IW2 | Bacillus licheniformis DSM 13 |
| | family | | | |
| 2267 | BLP02170 Short-chain dehydrogenase_reductase | Hypothetical protein [Bacillus licheniformis DSM 13] | UniRef100_Q65IW1 | Bacillus licheniformis DSM 13 |
| | SDR | | | |
| 2268 | BLP02171 mannonate dehydratase | D-mannonate hydrolase [Bacillus licheniformis DSM 13] | UniRef100_Q62UB8 | Bacillus licheniformis DSM 13 |
| 2269 | BLP02172 C4-dicarboxylate transport system | Hypothetical protein [Bacillus licheniformis DSM 13] | UniRef100_Q65IV8 | Bacillus licheniformis DSM 13 |
| | (Permease large) | | | |
| 2270 | BLP02173 putative C4-dicarboxylate transport system | Hypothetical protein [Bacillus licheniformis DSM 13] | UniRef100_Q65IV7 | Bacillus licheniformis DSM 13 |
| | permease small | | | |
| 2271 | dctB possible C4-dicarboxylate binding protein | DctB [Bacillus licheniformis DSM 13] | UniRef100_Q65IV6 | Bacillus licheniformis DSM 13 |
| 2272 | BLP02175 transcriptional regulator | Hypothetical protein [Bacillus licheniformis DSM 13] | UniRef100_Q65IV5 | Bacillus licheniformis DSM 13 |
| 2273 | BLP04739 hypothetical protein | | | |
| 2274 | arsC arsenate reductase | ArsC [Bacillus licheniformis DSM 13] | UniRef100_Q65IV4 | Bacillus licheniformis DSM 13 |
| 2275 | ydfA Arsenical pump membrane protein | YdfA [Bacillus licheniformis DSM 13] | UniRef100_Q65IV3 | Bacillus licheniformis DSM 13 |
| 2276 | ydeT hypothetical DNA-binding protein YdeT | YdeT [Bacillus licheniformis DSM 13] | UniRef100_Q65IV2 | Bacillus licheniformis DSM 13 |
| 2277 | BLP02179 hypothetical protein | | | |
| 2278 | ydel conserved hypothetical protein Ydel | Ydel [Bacillus licheniformis DSM 13] | UniRef100_Q65IV1 | Bacillus licheniformis DSM 13 |
| 2279 | BLP02181 hypothetical protein | Hypothetical Endonuclease/exonuclease/phosphatase | UniRef100_Q62UA8 | Bacillus licheniformis DSM 13 |
| | | [Bacillus licheniformis DSM 13] | | |
| 2280 | glcU hexose transporter GlcU | Hypothetical protein glcU [Bacillus licheniformis DSM 13] | UniRef100_Q65IU9 | Bacillus licheniformis DSM 13 |
| 2281 | yngK conserved protein YngK | Hypothetical protein yngK [Bacillus licheniformis DSM 13] | UniRef100_Q65IU8 | Bacillus licheniformis DSM 13 |
| 2282 | BLP02184 hypothetical protein | | | |
| 2283 | yngD conserved protein YngD | Hypothetical protein yngD [Bacillus licheniformis DSM 13] | UniRef100_Q65IU7 | Bacillus licheniformis DSM 13 |
| 2284 | BLP02186 putative Pyruvate formate-lyase-activating | Hypothetical protein [Bacillus licheniformis DSM 13] | UniRef100_Q65IU6 | Bacillus licheniformis DSM 13 |
| | enzyme | | | |
| 2285 | pfl putative formate C-acetyltransferase Pfl | Hypothetical protein [Bacillus licheniformis DSM 13] | UniRef100_Q65IU5 | Bacillus licheniformis DSM 13 |
| 2286 | BLP04740 hypothetical protein | | | |
| 2287 | dacC penicillin-binding protein (D-alanyl-D-alanine | DacC [Bacillus licheniformis DSM 13] | UniRef100_Q65IU4 | Bacillus licheniformis DSM 13 |
| | carboxypeptidase) | | | |
| 2288 | BLP04865 conserved hypothetical protein | YetF protein [Bacillus subtilis] | UniRef100_O31533 | Bacillus subtilis |
| 2289 | BLP02189 putative cardiolipin synthetase | Cardiolipin synthetase [Bacillus pseudofirmus] | UniRef100_O66043 | Bacillus pseudofirmus |
| 2290 | BLP02190 conserved hypothetical | Hypothetical Membrane Associated Protein [Bacillus cereus] | UniRef100_Q813S1 | Bacillus cereus |
| 2291 | BLP02191 conserved hypothetical protein | Hypothetical protein [Bacillus cereus] | UniRef100_Q72XX0 | Bacillus cereus |
| 2292 | BLP04866 conserved hypothetical protein | Hypothetical protein [Bacillus cereus] | UniRef100_Q815J7 | Bacillus cereus |
| 2293 | BLP02192 SpoVA-like protein | Stage V sporulation protein AE [Oceanobacillus iheyensis] | UniRef100_Q8ERC6 | Oceanobacillus iheyensis |
| 2294 | BLP02193 SpoVAD-like protein | Stage V sporulation protein AD [Bacillus anthracis] | UniRef100_Q81X67 | Bacillus anthracis |
| 2295 | BLP02194 SpoVAC-like protein | Stage V sporulation protein AC [Bacillus cereus] | UniRef100_Q72XX4 | Bacillus cereus |
| 2296 | BLP02195 conserved hypothetical protein | Lipoprotein, putative [Bacillus cereus] | UniRef100_Q72XX5 | Bacillus cereus |
| 2297 | BLP04867 highly conserved hypothetical protein | Hypothetical protein OB1383 [Oceanobacillus iheyensis] | UniRef100_Q8ERC2 | Oceanobacillus iheyensis |
| 2298 | BLP04868 conserved hypothetical, putative | UPI000032B913 UniRef100 entry | UniRef100_UPI000032B913 | |
| | oxidoreductase | | | |
| 2299 | BLP02196 manganese catalase | Mn catalase [Bacillus halodurans] | UniRef100_Q9KDZ2 | Bacillus halodurans |
| 2300 | BLP04821 conserved hypothetical | BH2251 protein [Bacillus halodurans] | UniRef100_Q9KAN6 | Bacillus halodurans |
| 2301 | BLP02197 hypothetical protein | UPI00003CB598 UniRef100 entry | UniRef100_UPI00003CB598 | |
| 2302 | BLP02199 N-acetylmuramoyl-L-alanine amidase | Sporulation specific N-acetylmuramoyl-L-alanine amidase | UniRef100_Q8CX69 | Oceanobacillus iheyensis |
| | | [Oceanobacillus iheyensis] | | |
| 2303 | BLP04869 hypothetical protein | | | |
| 2304 | BLP02200 resolvase | Transposon Tn1546 resolvase [Enterococcus faecium] | UniRef100_Q06237 | Enterococcus faecium |
| 2305 | BLP02201 putative transposase | Transposase for transposon Tn1546 [Enterococcus faecium] | UniRef100_Q06238 | Enterococcus faecium |
| 2306 | yjiD Aminotransferase, class IV YjiD | YjiD [Bacillus licheniformis DSM 13] | UniRef100_Q65IU3 | Bacillus licheniformis DSM 13 |
| 2307 | yjiC conserved hypothetical protein YjiC | YjiC [Bacillus licheniformis DSM 13] | UniRef100_Q65IU2 | Bacillus licheniformis DSM 13 |
| 2308 | BLP02207 hypothetical protein | Hypothetical protein [Bacillus licheniformis DSM 13] | UniRef100_Q62U99 | Bacillus licheniformis DSM 13 |
| 2309 | yoeD DNA binding domain, excisionase family protein | YoeD [Bacillus licheniformis DSM 13] | UniRef100_Q65IU1 | Bacillus licheniformis DSM 13 |
| | YoeD | | | |
| 2310 | ykzH conserved hypothetical protein YkzH | YkzH [Bacillus licheniformis DSM 13] | UniRef100_Q65IU0 | Bacillus licheniformis DSM 13 |
| 2311 | BLP02210 acetyl-CoA synthetase | Hypothetical protein [Bacillus licheniformis DSM 13] | UniRef100_Q65IT9 | Bacillus licheniformis DSM 13 |
| 2312 | yngE Carboxyl transferase | YngE [Bacillus licheniformis DSM 13] | UniRef100_Q65IT8 | Bacillus licheniformis DSM 13 |
| 2313 | yngF Enoyl-CoA hydratase_isomerase YngF | YngF [Bacillus licheniformis DSM 13] | UniRef100_Q65IT7 | Bacillus licheniformis DSM 13 |
| 2314 | yngG putative hydroxymethylglutaryl-CoA lyase | YngG [Bacillus licheniformis DSM 13] | UniRef100_Q65IT6 | Bacillus licheniformis DSM 13 |
| 2315 | | Hypothetical protein [Bacillus licheniformis DSM 13] | UniRef100_Q65IT5 | Bacillus licheniformis DSM 13 |
| 2316 | yngH Carbamoyl-phosphate synthase L chain, ATP | YngH [Bacillus licheniformis DSM 13] | UniRef100_Q65IT4 | Bacillus licheniformis DSM 13 |
| | binding | | | |
| 2317 | yngI AMP-dependent synthetase and ligase | YngI [Bacillus licheniformis DSM 13] | UniRef100_Q65IT3 | Bacillus licheniformis DSM 13 |
| 2318 | yngJ Acyl-CoA dehydrogenase | YngJ [Bacillus licheniformis DSM 13] | UniRef100_Q65IT2 | Bacillus licheniformis DSM 13 |
| 2319 | yrkL putative NAD(P)H oxidoreductase | YrkL (NAD(P)H dehydrogenase) [Bacillus licheniformis DSM | UniRef100_Q65IT1 | Bacillus licheniformis DSM 13 |
| | | 13] | | |
| 2320 | ydzF putative transcriptional regulator YdzF | | | |
| 2321 | proAA gamma-glutamyl phosphate reductase | Hypothetical protein [Bacillus licheniformis DSM 13] | UniRef100_Q65IS9 | Bacillus licheniformis DSM 13 |
| 2322 | proJ glutamate 5-kinase | ProJ [Bacillus licheniformis DSM 13] | UniRef100_Q65IS8 | Bacillus licheniformis DSM 13 |
| 2323 | proH pyrroline-5-carboxylate reductase | ProH [Bacillus licheniformis DSM 13] | UniRef100_Q65IS7 | Bacillus licheniformis DSM 13 |
| 2324 | BLP02222 hypothetical protein | | | |
| 2325 | BLP02223 hypothetical protein | | | |
| 2326 | yetF conserved membrane protein YetF | Hypothetical protein yetF [Bacillus licheniformis DSM 13] | UniRef100_Q65IS6 | Bacillus licheniformis DSM 13 |
| 2327 | BLP02225 hypothetical protein | | | |
| 2328 | cysP sulfate permease | Hypothetical protein [Bacillus licheniformis DSM 13] | UniRef100_Q65IS5 | Bacillus licheniformis DSM 13 |
| 2329 | yitB Phosphoadenosine phosphosulfate reductase | YitB [Bacillus licheniformis DSM 13] | UniRef100_Q65IS4 | Bacillus licheniformis DSM 13 |
| | CysH-type | | | |
| 2330 | yitD 2R-phospho-3-sulfolactate synthase, ComA | YitD ((2R)-phospho-3-sulfolactate synthase, ComA) [Bacillus | UniRef100_Q65IS3 | Bacillus licheniformis DSM 13 |
| | | licheniformis DSM 13] | | |
| 2331 | yitE conserved membrane protein YitE | Hypothetical protein yitE [Bacillus licheniformis DSM 13] | UniRef100_Q65IS2 | Bacillus licheniformis DSM 13 |
| 2332 | yitF YitF | YitF [Bacillus licheniformis DSM 13] | UniRef100_Q65IS1 | Bacillus licheniformis DSM 13 |
| 2333 | yitG Major facilitator superfamily YitG | YitG [Bacillus licheniformis DSM 13] | UniRef100_Q65IS0 | Bacillus licheniformis DSM 13 |
| 2334 | ykoT Glycosyl transferase, family 2 YkoT | YkoT [Bacillus licheniformis DSM 13] | UniRef100_Q65IR9 | Bacillus licheniformis DSM 13 |
| 2335 | ykoR hypothetical protein | YkoS [Bacillus licheniformis DSM 13] | UniRef100_Q65IR8 | Bacillus licheniformis DSM 13 |
| 2336 | BLP02234 hypothetical protein | | | |
| 2337 | BLP02235 hypothetical protein | | | |
| 2338 | gltB glutamate synthase (small subunit) | GltB [Bacillus licheniformis DSM 13] | UniRef100_Q65IR7 | Bacillus licheniformis DSM 13 |
| 2339 | gltA glutamate synthase (large subunit) | GltA [Bacillus licheniformis DSM 13] | UniRef100_Q65IR6 | Bacillus licheniformis DSM 13 |
| 2340 | gltC transcriptional regulator | GltC [Bacillus licheniformis DSM 13] | UniRef100_Q65IR5 | Bacillus licheniformis DSM 13 |
| 2341 | BLP02239 hypothetical protein | | | |
| 2342 | BLP02240 putative electron transporter | Hypothetical protein [Bacillus licheniformis DSM 13] | UniRef100_Q65IR4 | Bacillus licheniformis DSM 13 |
| 2343 | BLP02241 hypothetical protein | Hypothetical protein [Bacillus licheniformis DSM 13] | UniRef100_Q65IR3 | Bacillus licheniformis DSM 13 |
| 2344 | BLP02242 putative transcriptional regulator | Hypothetical protein [Bacillus licheniformis DSM 13] | UniRef100_Q65IR2 | Bacillus licheniformis DSM 13 |
| 2345 | yfiB ABC transporter | YfiB [Bacillus licheniformis DSM 13] | UniRef100_Q65IR1 | Bacillus licheniformis DSM 13 |
| 2346 | yfiC ABC transporter | YfiC [Bacillus licheniformis DSM 13] | UniRef100_Q65IR0 | Bacillus licheniformis DSM 13 |
| 2347 | BLP02245 hypothetical protein | | | |
| 2348 | BLP02246 Cytochrome P450 protein | Hypothetical protein [Bacillus licheniformis DSM 13] | UniRef100_Q65IQ9 | Bacillus licheniformis DSM 13 |
| 2349 | yoxD Short-chain dehydrogenase_reductase SDR | YoxD [Bacillus licheniformis DSM 13] | UniRef100_Q65IQ8 | Bacillus licheniformis DSM 13 |
| | YoxD | | | |
| 2350 | ppsl phosphoenolpyruvate synthase | Pps [Bacillus licheniformis DSM 13] | UniRef100_Q65IQ7 | Bacillus licheniformis DSM 13 |
| 2351 | BLP02249 hypothetical protein | | | |
| 2352 | lmrB drug-export protein | LmrB [Bacillus licheniformis DSM 13] | UniRef100_Q65IQ6 | Bacillus licheniformis DSM 13 |
| 2353 | yoaE putative oxidoreductase | YoaE [Bacillus licheniformis DSM 13] | UniRef100_Q65IQ5 | Bacillus licheniformis DSM 13 |
| 2354 | BLP02252 hypothetical protein | | | |
| 2355 | ycgE hypothetical DNA-binding protein | YcgE [Bacillus licheniformis DSM 13] | UniRef100_Q65IQ4 | Bacillus licheniformis DSM 13 |
| 2356 | mdr putative Drug resistance transporter, | Drug resistance transporter, EmrB/QacA family [Bacillus | UniRef100_Q736I5 | Bacillus cereus |
| | EmrB_QacA family, Mdr | cereus] | | |
| 2357 | yndE Spore germination protein YndE | YndE [Bacillus licheniformis DSM 13] | UniRef100_Q65IQ2 | Bacillus licheniformis DSM 13 |
| 2358 | yndF putative spore germination protein YndF | YndF [Bacillus licheniformis DSM 13] | UniRef100_Q65IQ1 | Bacillus licheniformis DSM 13 |
| 2359 | BLP02257 Spore germination protein | Hypothetical protein [Bacillus licheniformis DSM 13] | UniRef100_Q65IQ0 | Bacillus licheniformis DSM 13 |
| 2360 | BLP02258 Spore germination protein | Hypothetical protein [Bacillus licheniformis DSM 13] | UniRef100_Q65IP9 | Bacillus licheniformis DSM 13 |
| 2361 | yndD putative spore germination protein YndD | YndD [Bacillus licheniformis DSM 13] | UniRef100_Q65IP8 | Bacillus licheniformis DSM 13 |
| 2362 | BLP02260 hypothetical protein | | | |
| 2363 | expZ ATP-binding transport protein | ExpZ [Bacillus licheniformis DSM 13] | UniRef100_Q65IP7 | Bacillus licheniformis DSM 13 |
| 2364 | BLP02262 hypothetical protein | | | |
| 2365 | tlpB methyl-accepting chemotaxis protein TlPB | TlpB [Bacillus licheniformis DSM 13] | UniRef100_Q65IP6 | Bacillus licheniformis DSM 13 |
| 2366 | csaA molecular chaperone | CsaA [Bacillus licheniformis DSM 13] | UniRef100_Q65IP5 | Bacillus licheniformis DSM 13 |
| 2367 | aprX alkaline serine protease | AprX [Bacillus licheniformis DSM 13] | UniRef100_Q65IP4 | Bacillus licheniformis DSM 13 |
| 2368 | ynzE YnzE | Hypothetical protein ynzE [Bacillus licheniformis DSM 13] | UniRef100_Q65IP3 | Bacillus licheniformis DSM 13 |
| 2369 | BLP02267 putative transcriptional regulator | Hypothetical protein [Bacillus licheniformis DSM 13] | UniRef100_Q65IP2 | Bacillus licheniformis DSM 13 |
| 2370 | yvmB possible transcriptional regulator YvmB | YvmB [Bacillus licheniformis DSM 13] | UniRef100_Q65IP1 | Bacillus licheniformis DSM 13 |
| 2371 | BLP02269 putative hydrolase | Hypothetical protein [Bacillus licheniformis DSM 13] | UniRef100_Q65IP0 | Bacillus licheniformis DSM 13 |
| 2372 | BLP02270 conserved hypothetical protein | Hypothetical protein [Bacillus licheniformis DSM 13] | UniRef100_Q65IN9 | Bacillus licheniformis DSM 13 |
| 2373 | yndJ conserved hypothetical protein YndJ | YndJ [Bacillus licheniformis DSM 13] | UniRef100_Q65IN8 | Bacillus licheniformis DSM 13 |
| 2374 | yndH conserved hypothetical protein YndH | YndH [Bacillus licheniformis DSM 13] | UniRef100_Q65IN7 | Bacillus licheniformis DSM 13 |
| 2375 | yndG conserved hypothetical protein YndG | YndG [Bacillus licheniformis DSM 13] | UniRef100_Q65IN6 | Bacillus licheniformis DSM 13 |
| 2376 | yobS putative transcriptional regulator YobS | YobS [Bacillus licheniformis DSM 13] | UniRef100_Q65IN5 | Bacillus licheniformis DSM 13 |
| 2377 | yobT Beta-lactamase-like protein YobT | YobT [Bacillus licheniformis DSM 13] | UniRef100_Q65IN4 | Bacillus licheniformis DSM 13 |
| 2378 | yobU regulatory protein YobU | YobU [Bacillus licheniformis DSM 13] | UniRef100_Q65IN3 | Bacillus licheniformis DSM 13 |
| 2379 | BLP02277 conserved hypothetical protein | Hypothetical protein [Bacillus licheniformis DSM 13] | UniRef100_Q65IN2 | Bacillus licheniformis DSM 13 |
| 2380 | yobV putative transcriptional regulator YobV | YobV [Bacillus licheniformis DSM 13] | UniRef100_Q65IN1 | Bacillus licheniformis DSM 13 |
| 2381 | BLP02279 hypothetical protein | | | |
| 2382 | csk22 sigma-K-controlled sporulation membrane | Hypothetical protein csk22 [Bacillus licheniformis DSM 13] | UniRef100_Q62U37 | Bacillus licheniformis DSM 13 |
| | protein | | | |
| 2383 | yozA Transcriptional regulator, ArsR family, YozA | YozA [Bacillus licheniformis DSM 13] | UniRef100_Q65IM9 | Bacillus licheniformis DSM 13 |
| 2384 | ymaE putative Metallo-beta-lactamase family protein | YmaE [Bacillus licheniformis DSM 13] | UniRef100_Q65IM8 | Bacillus licheniformis DSM 13 |
| | YmaE | | | |
| 2385 | BLP02283 hypothetical protein | Hypothetical protein [Bacillus licheniformis DSM 13] | UniRef100_Q62U34 | Bacillus licheniformis DSM 13 |
| 2386 | yfnA Amino acid_polyamine transporter I | YfnA [Bacillus licheniformis DSM 13] | UniRef100_Q65IM7 | Bacillus licheniformis DSM 13 |
| 2387 | yocA putative Glycoside Hydrolase Family 23 YocA | YocA [Bacillus licheniformis DSM 13] | UniRef100_Q65IM6 | Bacillus licheniformis DSM 13 |
| 2388 | BLP04741 hypothetical protein | | | |
| 2389 | BLP02286 Capsular polysaccharide biosynthesis | Hypothetical protein [Bacillus licheniformis DSM 13] | UniRef100_Q65IM5 | Bacillus licheniformis DSM 13 |
| | protein E | | | |
| 2390 | BLP02287 hypothetical protein | Hypothetical protein [Bacillus licheniformis DSM 13] | UniRef100_Q65IM4 | Bacillus licheniformis DSM 13 |
| 2391 | BLP02288 hypothetical protein | Hypothetical protein [Bacillus licheniformis DSM 13] | UniRef100_Q65IM3 | Bacillus licheniformis DSM 13 |
| 2392 | BLP02289 putative glycosyl transferase Family 4 | Hypothetical protein [Bacillus licheniformis DSM 13] | UniRef100_Q65IM2 | Bacillus licheniformis DSM 13 |
| 2393 | yozB conserved hypothetical protein YozB | YozB [Bacillus licheniformis DSM 13] | UniRef100_Q65IM1 | Bacillus licheniformis DSM 13 |
| 2394 | BLP02291 conserved hypothetical protein | Hypothetical protein [Bacillus licheniformis DSM 13] | UniRef100_Q62U26 | Bacillus licheniformis DSM 13 |
| 2395 | yocC conserved hypothetical protein YocC | YocC [Bacillus licheniformis DSM 13] | UniRef100_Q65IL9 | Bacillus licheniformis DSM 13 |
| 2396 | BLP02293 Na_solute symporter | Na+/solute symporter [Bacillus licheniformis DSM 13] | UniRef100_Q62U24 | Bacillus licheniformis DSM 13 |
| 2397 | yocH conserved hypothetical protein YocH | YocH [Bacillus licheniformis DSM 13] | UniRef100_Q65IL7 | Bacillus licheniformis DSM 13 |
| 2398 | yocI ATP-dependent DNA helicase YocI | YacI [Bacillus licheniformis DSM 13] | UniRef100_Q65IL6 | Bacillus licheniformis DSM 13 |
| 2399 | BLP02296 conserved hypothetical protein | Hypothetical protein [Bacillus licheniformis DSM 13] | UniRef100_Q65IL5 | Bacillus licheniformis DSM 13 |
| 2400 | BLP02297 hypothetical protein | | | |
| 2401 | yjfB conserved hypothetical protein | YjfB [Bacillus licheniformis DSM 13] | UniRef100_Q65IL4 | Bacillus licheniformis DSM 13 |
| 2402 | yyaQ conserved protein YyaQ | Hypothetical protein yyaQ [Bacillus licheniformis DSM 13] | UniRef100_Q65IL3 | Bacillus licheniformis DSM 13 |
| 2403 | BLP04743 Adenine methyltransferase | | | |
| 2404 | BLP02299 hypothetical protein | Lin1262 protein [Listeria innocua] | UniRef100_Q92CC6 | Listeria innocua |
| 2405 | BLP02300 conserved hypothetical protein | Hypothetical protein [Bacillus licheniformis DSM 13] | UniRef100_Q65IL2 | Bacillus licheniformis DSM 13 |
| 2406 | yjgD hypothetical protein | YjgD [Bacillus licheniformis DSM 13] | UniRef100_Q65IL1 | Bacillus licheniformis DSM 13 |
| 2407 | yjgC iron-sulfur binding domain containing protein | | | |
| 2408 | BLP02303 hypothetical protein | | | |
| 2409 | BLP02304 hypothetical protein | Hypothetical protein [Bacillus licheniformis DSM 13] | UniRef100_Q65IK9 | Bacillus licheniformis DSM 13 |
| 2410 | BLP02305 hypothetical protein | | | |
| 2411 | BLP04870 hypothetical protein | | | |
| 2412 | BLP02306 conserved hypothetical protein | Hypothetical protein [Bacillus licheniformis DSM 13] | UniRef100_Q65IK8 | Bacillus licheniformis DSM 13 |
| 2413 | ypfA conserved hypothetical protein YpfA | YpfA [Bacillus licheniformis DSM 13] | UniRef100_Q65IK7 | Bacillus licheniformis DSM 13 |
| 2414 | BLP04744 hypothetical protein | | | |
| 2415 | BLP02308 hypothetical protein | | | |
| 2416 | BLP04871 conserved hypothetical protein | Hypothetical protein [Bacillus licheniformis DSM 13] | UniRef100_Q62U12 | Bacillus licheniformis DSM 13 |
| 2417 | BLP02309 partial transposase protein | | | |
| 2418 | BLP02310 conserved hypothetical protein | Hypothetical protein [Bacillus licheniformis DSM 13] | UniRef100_Q65IK6 | Bacillus licheniformis DSM 13 |
| 2419 | BLP02311 hypothetical protein | Prefoldin [Bacillus licheniformis DSM 13] | UniRef100_Q62U10 | Bacillus licheniformis DSM 13 |
| 2420 | BLP02312 hypothetical protein | Regulator of the activity of phosphatase RapE [Bacillus | UniRef100_Q62U09 | Bacillus licheniformis DSM 13 |
| | | licheniformis DSM 13] | | |
| 2421 | BLP02313 hypothetical protein | Hypothetical protein [Bacillus licheniformis DSM 13] | UniRef100_Q62U08 | Bacillus licheniformis DSM 13 |
| 2422 | yozQ conserved hypothetical protein YozQ | Hypothetical protein [Bacillus licheniformis DSM 13] | UniRef100_Q62U07 | Bacillus licheniformis DSM 13 |
| 2423 | BLP02315 Spore germination B3 GerAC like, C- | YndF [Bacillus licheniformis DSM 13] | UniRef100_Q65IQ1 | Bacillus licheniformis DSM 13 |
| | terminal | | | |
| 2424 | BLP02316 hypothetical protein | | | |
| 2425 | BLP04745 hypothetical protein | | | |
| 2426 | BLP02317 hypothetical protein | Hypothetical protein [Bacillus licheniformis DSM 13] | UniRef100_Q62U05 | Bacillus licheniformis DSM 13 |
| 2427 | BLP02318 conserved hypothetical protein | Hypothetical protein [Bacillus licheniformis DSM 13] | UniRef100_Q65IK1 | Bacillus licheniformis DSM 13 |
| 2428 | BLP02319 putative amidohydrolase like protein | Hypothetical protein [Bacillus licheniformis DSM 13] | UniRef100_Q65IK0 | Bacillus licheniformis DSM 13 |
| 2429 | BLP04746 spore coat protein (inner) | CotD [Bacillus licheniformis DSM 13] | UniRef100_Q65IJ9 | Bacillus licheniformis DSM 13 |
| 2430 | BLP02320 hypothetical protein | Hypothetical protein [Bacillus licheniformis DSM 13] | UniRef100_Q65IJ8 | Bacillus licheniformis DSM 13 |
| 2431 | yisY Esterase_lipase_thioesterase family protein YisY | YisY [Bacillus licheniformis DSM 13] | UniRef100_Q65IJ7 | Bacillus licheniformis DSM 13 |
| 2432 | BLP02322 hypothetical protein | YoqH [Bacillus licheniformis DSM 13] | UniRef100_Q65IJ6 | Bacillus licheniformis DSM 13 |
| 2433 | BLP04747 spore coat protein (inner) | Spore coat protein [Bacillus licheniformis DSM 13] | UniRef100_Q62TZ9 | Bacillus licheniformis DSM 13 |
| 2434 | BLP02323 Lysine exporter protein | Hypothetical protein [Bacillus licheniformis DSM 13] | UniRef100_Q65IJ5 | Bacillus licheniformis DSM 13 |
| 2435 | BLP04748 hypothetical protein | | | |
| 2436 | BLP02324 30S ribosomal protein S14 | Hypothetical protein [Bacillus licheniformis DSM 13] | UniRef100_Q65IJ4 | Bacillus licheniformis DSM 13 |
| 2437 | mutT mutator protein | MutT [Bacillus licheniformis DSM 13] | UniRef100_Q65IJ3 | Bacillus licheniformis DSM 13 |
| 2438 | ppsII phosphoenolpyruvate synthase | Hypothetical protein [Bacillus licheniformis DSM 13] | UniRef100_Q65IJ2 | Bacillus licheniformis DSM 13 |
| 2439 | BLP04749 hypothetical protein | | | |
| 2440 | BLP02327 putative transcriptional regulator TetR | TetR [Bacillus licheniformis DSM 13] | UniRef100_Q65IJ1 | Bacillus licheniformis DSM 13 |
| | family | | | |
| 2441 | BLP02328 hypothetical protein | Hypothetical protein [Bacillus licheniformis DSM 13] | UniRef100_Q62TZ3 | Bacillus licheniformis DSM 13 |
| 2442 | yndM conserved hypothetical protein YndM | YndM [Bacillus licheniformis DSM 13] | UniRef100_Q65IJ0 | Bacillus licheniformis DSM 13 |
| 2443 | yisT conserved protein YisT | DinB [Bacillus licheniformis DSM 13] | UniRef100_Q65II9 | Bacillus licheniformis DSM 13 |
| 2444 | yocJ Putative acyl carrier protein phosphodiesterase, | YocJ (NAD(P)H dehydrogenase) [Bacillus licheniformis DSM | UniRef100_Q65II8 | Bacillus licheniformis DSM 13 |
| | NAD(P)H dehydrogenase YocJ | 13] | | |
| 2445 | yocK general stress protein homolog, Zn-finger | YocK [Bacillus licheniformis DSM 13] | UniRef100_Q65II7 | Bacillus licheniformis DSM 13 |
| | protein YocK | | | |
| 2446 | BLP02333 hypothetical protein | | | |
| 2447 | yozO conserved hypothetical protein YozO | YozO [Bacillus licheniformis DSM 13] | UniRef100_Q65II6 | Bacillus licheniformis DSM 13 |
| 2448 | yozC conserved protein YozC | YozC [Bacillus licheniformis DSM 13] | UniRef100_Q65II5 | Bacillus licheniformis DSM 13 |
| 2449 | BLP04750 hypothetical protein | | | |
| 2450 | dhaS aldehyde dehydrogenase | DhaS [Bacillus licheniformis DSM 13] | UniRef100_Q65II4 | Bacillus licheniformis DSM 13 |
| 2451 | yjbB conserved membrane protein YjbB, putative | YjbB [Bacillus licheniformis DSM 13] | UniRef100_Q65II3 | Bacillus licheniformis DSM 13 |
| | transporter | | | |
| 2452 | BLP02339 GCN5-related N-acetyltransferase | Hypothetical protein [Bacillus licheniformis DSM 13] | UniRef100_Q65II2 | Bacillus licheniformis DSM 13 |
| 2453 | BLP02340 putative deaminase | Hypothetical protein [Bacillus licheniformis DSM 13] | UniRef100_Q65II1 | Bacillus licheniformis DSM 13 |
| 2454 | sqhC SqhC | Squalene-hopene cyclase [Bacillus licheniformis DSM 13] | UniRef100_Q62TY2 | Bacillus licheniformis DSM 13 |
| 2455 | sodF superoxide dismutase | SodF [Bacillus licheniformis DSM 13] | UniRef100_Q65IH9 | Bacillus licheniformis DSM 13 |
| 2456 | yvgO conserved protein YvgO | Hypothetical protein yvgO [Bacillus licheniformis DSM 13] | UniRef100_Q65IH8 | Bacillus licheniformis DSM 13 |
| 2457 | BLP02344 hypothetical protein | | | |
| 2458 | yocR sodium-dependent transporter | YocR [Bacillus licheniformis DSM 13] | UniRef100_Q65IH7 | Bacillus licheniformis DSM 13 |
| 2459 | yocS sodium ion transporter YocS | YocS [Bacillus licheniformis DSM 13] | UniRef100_Q65IH6 | Bacillus licheniformis DSM 13 |
| 2460 | odhB 2-oxoglutarate dehydrogenase complex | OdhB [Bacillus licheniformis DSM 13] | UniRef100_Q65IH5 | Bacillus licheniformis DSM 13 |
| | (dihydrolipoamide transsuccinylase, E2 subunit) | | | |
| 2461 | odhA 2-oxoglutarate dehydrogenase (E1 subunit) | OdhA [Bacillus licheniformis DSM 13] | UniRef100_Q65IH4 | Bacillus licheniformis DSM 13 |
| 2462 | yojO von Willebrand factor, type A domain containing | YojO [Bacillus licheniformis DSM 13] | UniRef100_Q65IH3 | Bacillus licheniformis DSM 13 |
| | protein YojO | | | |
| 2463 | yojN putative nitric oxide reductase YojN | YojN [Bacillus licheniformis DSM 13] | UniRef100_Q65IH2 | Bacillus licheniformis DSM 13 |
| 2464 | BLP02351 hypothetical protein | | | |
| 2465 | yojM Copper_Zinc superoxide dismutase YojM | YojM [Bacillus licheniformis DSM 13] | UniRef100_Q65IH1 | Bacillus licheniformis DSM 13 |
| 2466 | yojL gamma-D-glutamate-meso-diaminopimelate | YojL [Bacillus licheniformis DSM 13] | UniRef100_Q65IH0 | Bacillus licheniformis DSM 13 |
| | muropeptidase YojL | | | |
| 2467 | BLP02354 hypothetical protein | | | |
| 2468 | BLP04751 hypothetical protein | | | |
| 2469 | BLP04752 hypothetical protein | | | |
| 2470 | norM putative multidrug resistance protein | YojI [Bacillus licheniformis DSM 13] | UniRef100_Q65IG9 | Bacillus licheniformis DSM 13 |
| 2471 | BLP02356 conserved protein, Carbohydrate Esterase | Hypothetical protein [Bacillus licheniformis DSM 13] | UniRef100_Q65IG8 | Bacillus licheniformis DSM 13 |
| | Family 14 | | | |
| 2472 | BLP02357 hypothetical protein | YojF [Bacillus licheniformis DSM 13] | UniRef100_Q65IG7 | Bacillus licheniformis DSM 13 |
| 2473 | yojE conserved hypothetical protein YojE | Hypothetical protein [Bacillus licheniformis DSM 13] | UniRef100_Q65IG6 | Bacillus licheniformis DSM 13 |
| 2474 | yojD putative chloramphenicol sensitive protein YojD | YojE [Bacillus licheniformis DSM 13] | UniRef100_Q65IG5 | Bacillus licheniformis DSM 13 |
| 2475 | BLP02360 hypothetical protein | YozR [Bacillus licheniformis DSM 13] | UniRef100_Q65IG4 | Bacillus licheniformis DSM 13 |
| 2476 | BLP02361 hypothetical protein | | | |
| 2477 | yoaJ YoaJ | YoaJ [Bacillus licheniformis DSM 13] | UniRef100_Q65IG3 | Bacillus licheniformis DSM 13 |
| 2478 | yojB conserved hypothetical protein YojB | Hypothetical protein [Bacillus licheniformis DSM 13] | UniRef100_Q65IG2 | Bacillus licheniformis DSM 13 |
| 2479 | BLP02364 Short-chain dehydrogenase_reductase | Hypothetical protein [Bacillus licheniformis DSM 13] | UniRef100_Q65IG1 | Bacillus licheniformis DSM 13 |
| | protein | | | |
| 2480 | yodB hypothetical DNA-binding protein YodB | Winged helix DNA-binding (Bacillus licheniformis DSM 13] | UniRef100_Q62TW2 | Bacillus licheniformis DSM 13 |
| 2481 | yodC putative Nitroreductase YodC | YodC [Bacillus licheniformis DSM 13] | UniRef100_Q65IF9 | Bacillus licheniformis DSM 13 |
| 2482 | yodD Phospholipase_carboxylesterase family protein | YodD [Bacillus licheniformis DSM 13] | UniRef100_Q65IF8 | Bacillus licheniformis DSM 13 |
| 2483 | BLP02368 hypothetical protein | | | |
| 2484 | BLP02369 conserved hypothetical protein | YhjC [Bacillus licheniformis DSM 13] | UniRef100_Q65IF7 | Bacillus licheniformis DSM 13 |
| 2485 | yodF Na_solute symporter YodF | YodF [Bacillus licheniformis DSM 13] | UniRef100_Q65IF6 | Bacillus licheniformis DSM 13 |
| 2486 | ctpA carboxy-terminal processing protease | CtpA [Bacillus licheniformis DSM 13] | UniRef100_Q65IF3 | Bacillus licheniformis DSM 13 |
| 2487 | yodH SAM dependent methyltransferase YodH | YodH (SAM (And some other nucleotide) binding motif) | UniRef100_Q65IF2 | Bacillus licheniformis DSM 13 |
| | | [Bacillus licheniformis DSM 13] | | |
| 2488 | yodI conserved hypothetical protein YodI | YodI [Bacillus licheniformis DSM 13] | UniRef100_Q65IF1 | Bacillus licheniformis DSM 13 |
| 2489 | yodJ putative carboxypeptidase | YodJ [Bacillus licheniformis DSM 13] | UniRef100_Q65IF0 | Bacillus licheniformis DSM 13 |
| 2490 | deoD purine nucleoside phosphorylase | DeoD [Bacillus licheniformis DSM 13] | UniRef100_Q65IE9 | Bacillus licheniformis DSM 13 |
| 2491 | BLP02376 hypothetical protein | | | |
| 2492 | BLP02377 Predicted permease_membrane protein | Hypothetical protein [Bacillus licheniformis DSM 13] | UniRef100_Q65IE8 | Bacillus licheniformis DSM 13 |
| 2493 | BLP02378 conserved hypothetical protein | Hypothetical protein [Bacillus licheniformis DSM 13] | UniRef100_Q65IE7 | Bacillus licheniformis DSM 13 |
| 2494 | BLP02379 conserved hypothetical protein | Hypothetical protein [Bacillus licheniformis DSM 13] | UniRef100_Q62TU8 | Bacillus licheniformis DSM 13 |
| 2495 | yodL conserved hypothetical protein YodL | YodL [Bacillus licheniformis DSM 13] | UniRef100_Q65IE6 | Bacillus licheniformis DSM 13 |
| 2496 | yodM putative acid phosphatase YodM | YodM [Bacillus licheniformis DSM 13] | UniRef100_Q65IE5 | Bacillus licheniformis DSM 13 |
| 2497 | yozD conserved hypothetical protein YozD | YozD [Bacillus licheniformis DSM 13] | UniRef100_Q65IE4 | Bacillus licheniformis DSM 13 |
| 2498 | BLP02383 hypothetical protein | | | |
| 2499 | yodN conserved hypothetical protein YodN | YodN [Bacillus licheniformis DSM 13] | UniRef100_Q65IE3 | Bacillus licheniformis DSM 13 |
| 2500 | BLP02385 hypothetical protein | | | |
| 2501 | yozE conserved hypothetical YozE | Hypothetical protein [Bacillus licheniformis DSM 13] | UniRef100_Q65IE2 | Bacillus licheniformis DSM 13 |
| 2502 | yokU hypothetical protein | Hypothetical protein [Bacillus licheniformis DSM 13] | UniRef100_Q65IE1 | Bacillus licheniformis DSM 13 |
| 2503 | kamA lysine 2,3-aminomutase | KamA [Bacillus licheniformis DSM 13] | UniRef100_Q65IE0 | Bacillus licheniformis DSM 13 |
| 2504 | yodV, yokI phage protein | Hypothetical protein yotM [Bacteriophage SPBc2] | UniRef100_O64195 | Bacteriophage SPBc2 |
| 2505 | yotK phage related sp-beta protein YotK | | | |
| 2506 | BLP02390 hypothetical phage protein | UPI00002F65FC UniRef100 entry | UniRef100_UPI00002F65FC | |
| 2507 | BLP02391 hypothetical phage protein | | | |
| 2508 | BLP02392 hypothetical phage protein | | | |
| 2509 | yotH phage protein YotH | Hypothetical protein yotH [Bacteriophage SPBc2] | UniRef100_O64190 | Bacteriophage SPBc2 |
| 2510 | BLP04754 hypothetical phage protein | | | |
| 2511 | yotB phage protein YotB | Hypothetical protein yotB [Bacteriophage SPBc2] | UniRef100_O64184 | Bacteriophage SPBc2 |
| 2512 | BLP02395 hypothetical protein | | | |
| 2513 | BLP04873 Small acid-soluble spore protein | | | |
| 2514 | BLP02396 hypothetical protein | | | |
| 2515 | BLP02397 hypothetical protein | | | |
| 2516 | yosX phage protein | Hypothetical protein yosX from SPbetac2 prophage [Bacillus | UniRef100_O34646 | Bacillus subtilis |
| | | subtilis] | | |
| 2517 | BLP02399 putative Thymidylate synthase | Thymidylate synthase [Streptococcus pneumoniae] | UniRef100_P67050 | Streptococcus pneumoniae |
| 2518 | yosV YosV | Hypothetical protein yosV [Bacteriophage SPBc2] | UniRef100_O64180 | Bacteriophage SPBc2 |
| 2519 | BLP02401 hypothetical protein | | | |
| 2520 | yncF phage protein | YncF protein [Bacillus subtilis] | UniRef100_O31801 | Bacillus subtilis |
| 2521 | BLP02403 hypothetical protein | | | |
| 2522 | yosR thioredoxin phage sp-beta YosR | Thioredoxin [Bacteriophage SPBc2] | UniRef100_O64176 | Bacteriophage SPBc2 |
| 2523 | BLP02405 ribonucleoside-diphosphate reductase | Ribonucleoside-diphosphate reductase beta chain [Bacillus | UniRef100_P50621 | Bacillus subtilis |
| | (minor subunit) | subtilis] | | |
| 2524 | BLP02406 DNA-methyltransferase (Cytosine-specific) | DNA-methyltransferase [Clostridium acetobutylicum] | UniRef100_Q97JQ1 | Clostridium acetobutylicum |
| 2525 | BLP02407 hypothetical protein | | | |
| 2526 | BLP02408 HNH endonuclease | Endonuclease [Bacteroides thetaiotaomicron] | UniRef100_Q8A660 | Bacteroides thetaiotaomicron |
| 2527 | BLP04874 nrdI-like phage protein | Phage-derived nrdI protein [Bacillus subtilis] | UniRef100_O31876 | Bacillus subtilis |
| 2528 | yosL YosL | Hypothetical protein yosL [Bacteriophage SPBc2] | UniRef100_O64171 | Bacteriophage SPBc2 |
| 2529 | BLP02412 hypothetical protein | | | |
| 2530 | yosI conserved hypothetical YosI | Hypothetical protein yosI [Bacteriophage SPBc2] | UniRef100_O64168 | Bacteriophage SPBc2 |
| 2531 | yosH phage like conserved hyopothetical YosH | Hypothetical protein yosH [Bacteriophage SPBc2] | UniRef100_O64167 | Bacteriophage SPBc2 |
| 2532 | BLP02415 conserved hypothetical protein | UPI0000313F1C UniRef100 entry | UniRef100_UPI0000313F1C | |
| 2533 | BLP04755 hypothetical protein | | | |
| 2534 | BLP02416 hypothetical protein | | | |
| 2535 | BLP02417 phage hypothetical protein | | | |
| 2536 | BLP02418 phage hypothetical protein | | | |
| 2537 | BLP02419 hypothetical protein | | | |
| 2538 | yorZ YorZ | Hypothetical protein yorZ [Bacteriophage SPBc2] | UniRef100_O64159 | Bacteriophage SPBc2 |
| 2539 | yorY YorY | Hypothetical protein yorY [Bacteriophage SPBc2] | UniRef100_O64158 | Bacteriophage SPBc2 |
| 2540 | BLP04875 hypothetical protein | | | |
| 2541 | BLP02422 conserved hyopothetical | | | |
| 2542 | yorQ YorQ | Hypothetical protein yorQ [Bacteriophage SPBc2] | UniRef100_O64151 | Bacteriophage SPBc2 |
| 2543 | BLP02424 hypothetical protein | | | |
| 2544 | yorP YorP | Hypothetical protein yorP [Bacteriophage SPBc2] | UniRef100_O64150 | Bacteriophage SPBc2 |
| 2545 | yorM sp beta phage related protein YorM | YorM protein [Bacteriophage SPBc2] | UniRef100_O64147 | Bacteriophage SPBc2 |
| 2546 | yorL YorL | Putative DNA polymerase [Bacteriophage SPBc2] | UniRef100_O64146 | Bacteriophage SPBc2 |
| 2547 | BLP02427 putative HNH endonuclease | UPI00003CC2BC UniRef100 entry | UniRef100_UPI00003CC2BC | |
| 2548 | yorK Putative replicative DNA helicase | Putative ss-DNA-specific endonuclease [Bacteriophage | UniRef100_O64145 | Bacteriophage SPBc2 |
| | | SPBc2] | | |
| 2549 | yorJ spbeta like phage protein YorJ | Hypothetical protein yorJ [Bacteriophage SPBc2] | UniRef100_O64144 | Bacteriophage SPBc2 |
| 2550 | yorI Putative replicative DNA helicase | Putative replicative DNA helicase [Bacteriophage SPBc2] | UniRef100_O64143 | Bacteriophage SPBc2 |
| 2551 | yorH YorH | Hypothetical protein yorH [Bacteriophage SPBc2] | UniRef100_O64142 | Bacteriophage SPBc2 |
| 2552 | yorG ATP_GTP binding phage protein YorG | ATP/GTP binding protein [Bacteriophage SPBc2] | UniRef100_O64141 | Bacteriophage SPBc2 |
| 2553 | yorF conserved hypothetical phage protein YorF | Hypothetical protein yorF [Bacteriophage SPBc2] | UniRef100_O64140 | Bacteriophage SPBc2 |
| 2554 | yorE conserved hypothetical protein YorE | Hypothetical protein yorE [Bacteriophage SPBc2] | UniRef100_O64139 | Bacteriophage SPBc2 |
| 2555 | BLP04758 hypothetical protein | | | |
| 2556 | BLP02435 hypothetical protein | Precursor polypeptide (AA −37 to 1647) precursor | UniRef100_Q03658 | unidentified bacterium |
| | | [unidentified bacterium] | | |
| 2557 | BLP02436 hypothetical protein | | | |
| 2558 | BLP04877 hypothetical protein | | | |
| 2559 | BLP02437 hypothetical protein | | | |
| 2560 | BLP04759 hypothetical protein | | | |
| 2561 | BLP02438 hypothetical protein | | | |
| 2562 | BLP02439 hypothetical protein | | | |
| 2563 | BLP02440 phage related protein | Hypothetical protein [Bacillus licheniformis DSM 13] | UniRef100_Q65KR1 | Bacillus licheniformis DSM 13 |
| 2564 | BLP02441 hypothetical protein | | | |
| 2565 | yoqX conserved hypothetical phage protein YoqX | Hypothetical protein yoqX [Bacteriophage SPBc2] | UniRef100_O64132 | Bacteriophage SPBc2 |
| 2566 | yoqV DNA ligase, phage related YoqV | YoqV protein [Bacteriophage SPBc2] | UniRef100_O64130 | Bacteriophage SPBc2 |
| 2567 | BLP02444 hypothetical protein | | | |
| 2568 | BLP02445 hypothetical protein | | | |
| 2569 | BLP02446 hypothetical protein | | | |
| 2570 | BLP02447 hypothetical protein | | | |
| 2571 | BLP04760 hypothetical protein | | | |
| 2572 | BLP04878 hypothetical protein | | | |
| 2573 | BLP02448 hypothetical protein | | | |
| 2574 | yoqJ phage YoqJ protein | YoqJ protein [Bacteriophage SPBc2] | UniRef100_O64119 | Bacteriophage SPBc2 |
| 2575 | BLP02450 hypothetical protein | | | |
| 2576 | BLP02451 hypothetical protein | | | |
| 2577 | BLP02452 hypothetical protein | | | |
| 2578 | BLP02453 putative ribonuclease | Exodeoxyribonuclease V [Agrobacterium tumefaciens] | UniRef100_Q8UDU3 | Agrobacterium tumefaciens |
| 2579 | BLP02454 hypothetical protein | | | |
| 2580 | BLP02455 hypothetical protein | | | |
| 2581 | BLP04761 hypothetical protein | | | |
| 2582 | yopR YopR | Hypothetical protein yopR [Bacteriophage SPBc2] | UniRef100_O64101 | Bacteriophage SPBc2 |
| 2583 | yopQ YopQ | Hypothetical protein yopQ [Bacteriophage SPBc2] | UniRef100_O64100 | Bacteriophage SPBc2 |
| 2584 | yopP integrase family phage protein YopP | Hypothetical protein yopP [Bacteriophage SPBc2] | UniRef100_O64099 | Bacteriophage SPBc2 |
| 2585 | yopN SPBc2-like prophage-derived hypothetical | | | |
| | protein YopN | | | |
| 2586 | yopM Hypothetical protein YopM | | | |
| 2587 | BLP02461 hypothetical protein | | | |
| 2588 | yopK conserved hypothetical protein YopK | Hypothetical protein yopK [Bacteriophage SPBc2] | UniRef100_O64094 | Bacteriophage SPBc2 |
| 2589 | BLP04879 conserved hypothetical protein | | | |
| 2590 | BLP02463 hypothetical protein | | | |
| 2591 | BLP02464 conserved hypothetical protein | MafB-related protein [Bacillus cereus] | UniRef100_Q81BC9 | Bacillus cereus |
| 2592 | BLP02465 hypothetical protein | | | |
| 2593 | BLP02466 Putative subtilase family protease | ParA [Bacillus subtilis] | UniRef100_Q45510 | Bacillus subtilis |
| 2594 | BLP04880 hypothetical protein | | | |
| 2595 | BLP02467 conserved hypothetical protein | | | |
| 2596 | BLP02468 conserved hypothetical protein | Hypothetical protein [Rhodopirellula baltica] | UniRef100_Q7UT52 | Rhodopirellula baltica |
| 2597 | BLP02469 hypothetical protein | | | |
| 2598 | BLP02471 hypothetical protein | | | |
| 2599 | BLP02472 hypothetical protein | | | |
| 2600 | BLP02473 hypothetical protein | | | |
| 2601 | BLP02474 hypothetical protein | | | |
| 2602 | BLP02475 hypothetical protein | | | |
| 2603 | BLP02476 hypothetical protein | | | |
| 2604 | BLP02477 conserved hypothetical protein | Abi-alpha protein [Staphylococcus epidermidis] | UniRef100_Q8CQJ5 | Staphylococcus epidermidis |
| 2605 | BLP02478 hypothetical protein | | | |
| 2606 | BLP02479 conserved hypothetical protein | UPI00002B934B UniRef100 entry | UniRef100_UPI00002B934B | |
| 2607 | BLP02476 hypothetical protein | | | |
| 2608 | BLP02476 hypothetical protein | | | |
| 2609 | BLP02482 hypothetical protein | | | |
| 2610 | BLP02483 hypothetical protein | | | |
| 2611 | BLP02483 hypothetical protein | | | |
| 2612 | BLP02485 hypothetical protein | | | |
| 2613 | yopB conserved phage hypothetical protein YopB | Hypothetical protein yopB [Bacteriophage SPBc2] | UniRef100_O64085 | Bacteriophage SPBc2 |
| 2614 | BLP02487 hypothetical protein | | | |
| 2615 | BLP02488 hypothetical protein | | | |
| 2616 | BLP02489 hypothetical protein | | | |
| 2617 | BLP04881 hypothetical protein | | | |
| 2618 | BLP04882 hypothetical protein | | | |
| 2619 | BLP02490 hypothetical protein | | | |
| 2620 | BLP02491 hypothetical protein | | | |
| 2621 | BLP02492 hypothetical protein | | | |
| 2622 | BLP02493 hypothetical protein | | | |
| 2623 | BLP02494 hypothetical protein | | | |
| 2624 | BLP02495 hypothetical protein | | | |
| 2625 | BLP02496 hypothetical protein | | | |
| 2626 | BLP02497 hypothetical protein | | | |
| 2627 | yonV hypothetical phage protein YonV | Hypothetical protein yonV [Bacteriophage SPBc2] | UniRef100_O64082 | Bacteriophage SPBc2 |
| 2628 | BLP02499 Putative GIY-VIG endonuclease | Hypothetical protein yonV [Bacteriophage SPBc2] | UniRef100_O64082 | Bacteriophage SPBc2 |
| 2629 | BLP04762 hypothetical protein | | | |
| 2630 | BLP04763 hypothetical protein | | | |
| 2631 | BLP04883 conserved hypothetical phage protein | Orf45 [Bacteriophage SPP1] | UniRef100_Q38074 | Bacteriophage SPP1 |
| 2632 | BLP04884 conserved hypothetical protein | YqgA [Bacillus subtilis] | UniRef100_Q71N51 | Bacillus subtilis |
| 2633 | BLP04885 hypothetical protein | | | |
| 2634 | BLP02500 hypothetical protein | | | |
| 2635 | BLP02501 conserved phage like protein | Hypothetical protein yonO [Bacteriophage SPBc2] | UniRef100_O64076 | Bacteriophage SPBc2 |
| 2636 | BLP02502 conserved phage related protein | | | |
| 2637 | BLP02503 DNA binding protein | Hbs (Non-specific DNA-binding protein HBsu signal | UniRef100_Q65I20 | Bacillus licheniformis DSM 13 |
| | | recognition particle-like (SRP) component) [Bacillus | | |
| | | licheniformis DSM 13] | | |
| 2638 | BLP02504 hypothetical protein | | | |
| 2639 | BLP02505 conserved hypothetical protein | Hypothetical protein [Bacillus cereus] | UniRef100_Q72XD0 | Bacillus cereus |
| 2640 | yonK YonK | Hypothetical protein yonK [Bacteriophage SPBc2] | UniRef100_O64074 | Bacteriophage SPBc2 |
| 2641 | yonJ phage protein YonJ | Hypothetical protein yonJ [Bacteriophage SPBc2] | UniRef100_O64073 | Bacteriophage SPBc2 |
| 2642 | BLP02508 hypothetical protein | | | |
| 2643 | BLP02509 hypothetical protein | | | |
| 2644 | BLP02510 hypothetical protein | | | |
| 2645 | BLP04886 hypothetical protein | Hypothetical protein [Bacillus thuringiensis] | UniRef100_Q6HM48 | Bacillus thuringiensis |
| 2646 | BLP02511 hypothetical protein | | | |
| 2647 | yonG YonG | Hypothetical protein yonG [Bacteriophage SPBc2] | UniRef100_O64070 | Bacteriophage SPBc2 |
| 2648 | yonF YonF | Hypothetical protein yonF [Bacteriophage SPBc2] | UniRef100_O64069 | Bacteriophage SPBc2 |
| 2649 | yonE YonE | Hypothetical protein yonE [Bacteriophage SPBc2] | UniRef100_O64068 | Bacteriophage SPBc2 |
| 2650 | yonD YonD | Hypothetical protein yonD [Bacteriophage SPBc2] | UniRef100_O64067 | Bacteriophage SPBc2 |
| 2651 | yonC YonC | Hypothetical protein yonC [Bacteriophage SPBc2] | UniRef100_O64066 | Bacteriophage SPBc2 |
| 2652 | yonB YonB | Hypothetical protein yonB [Bacteriophage SPBc2] | UniRef100_O64065 | Bacteriophage SPBc2 |
| 2653 | yonA YonA | Hypothetical protein yonA [Bacteriophage SPBc2] | UniRef100_O64064 | Bacteriophage SPBc2 |
| 2654 | yomZ YomZ | Hypothetical protein yomZ [Bacteriophage SPBc2] | UniRef100_O64063 | Bacteriophage SPBc2 |
| 2655 | yomY YomY | Hypothetical protein yomY [Bacteriophage SPBc2] | UniRef100_O64062 | Bacteriophage SPBc2 |
| 2656 | yomX YomX | Hypothetical protein yomX [Bacteriophage SPBc2] | UniRef100_O64061 | Bacteriophage SPBc2 |
| 2657 | yomW YomW | Hypothetical protein yomW [Bacteriophage SPBc2] | UniRef100_O64060 | Bacteriophage SPBc2 |
| 2658 | yomV YomV | Hypothetical protein yomV [Bacteriophage SPBc2] | UniRef100_O64059 | Bacteriophage SPBc2 |
| 2659 | yomU YomU | Hypothetical protein yomU [Bacteriophage SPBc2] | UniRef100_O64058 | Bacteriophage SPBc2 |
| 2660 | BLP02524 hypothetical phagelike protein | Hypothetical protein [Bacillus licheniformis DSM 13] | UniRef100_Q65ES8 | Bacillus licheniformis DSM 13 |
| 2661 | yomS YomS | YomS protein [Bacteriophage SPBc2] | UniRef100_O64055 | Bacteriophage SPBc2 |
| 2662 | BLP02526 conserved hypothetical phagelike protein | Hypothetical protein [Bacillus licheniformis DSM 13] | UniRef100_Q65ET9 | Bacillus licheniformis DSM 13 |
| 2663 | yomQ conserved hypothetical protein YomQ | YomQ [Bacillus licheniformis DSM 13] | UniRef100_Q65EU0 | Bacillus licheniformis DSM 13 |
| 2664 | yomO conserved hypothetical phage protein YomO | Hypothetical protein yomO [Bacteriophage SPBc2] | UniRef100_O64051 | Bacteriophage SPBc2 |
| 2665 | yomN conserved hypothetical protein YomN | Hypothetical protein [Bacteriophage SPBc2] | UniRef100_O64050 | Bacteriophage SPBc2 |
| 2666 | yomM conserved hypothetical phage protein YomM | Hypothetical protein yomM [Bacteriophage SPBc2] | UniRef100_O64049 | Bacteriophage SPBc2 |
| 2667 | BLP02529 hypothetical protein | | | |
| 2668 | BLP02530 conserved hypothetical protein | Hypothetical protein [Bacillus licheniformis DSM 13] | UniRef100_Q65J73 | Bacillus licheniformis DSM 13 |
| 2669 | BLP04889 conserved hypothetical protein | Hypothetical protein yjcP [Bacillus subtilis] | UniRef100_O31638 | Bacillus subtilis |
| 2670 | yomK conserved hypothetical phage protein YomK | Hypothetical protein yomK [Bacteriophage SPBc2] | UniRef100_O64047 | Bacteriophage SPBc2 |
| 2671 | BLP02532 hypothetical protein | | | |
| 2672 | BLP02533 conserved hypothetical phage protein | Phage protein [Bacillus cereus] | UniRef100_Q81D00 | Bacillus cereus |
| 2673 | yomJ YomJ | D protein [Bacteriophage phi-3T] | UniRef100_Q37974 | Bacteriophage phi-3T |
| 2674 | BLP02535 hypothetical protein | | | |
| 2675 | BLP04890 hypothetical protein | | | |
| 2676 | BLP02536 conserved hypothetical protein | Hypothetical protein Lin1255/Lin1742 [Listeria innocua] | UniRef100_Q926A7 | Listeria innocua |
| 2677 | BLP02537 hypothetical protein | | | |
| 2678 | yomI YomI | Putative transglycosylase [Bacteriophage SPBc2] | UniRef100_O64046 | Bacteriophage SPBc2 |
| 2679 | yomH conserved phage protein YomH | Hypothetical protein yomH [Bacteriophage SPBc2] | UniRef100_O64045 | Bacteriophage SPBc2 |
| 2680 | yomG conserved phage protein YomG | YomG [Bacteriophage SPBc2] | UniRef100_O64044 | Bacteriophage SPBc2 |
| 2681 | yomF conserved phage protein YomF | Hypothetical protein yomF [Bacteriophage SPBc2] | UniRef100_O64043 | Bacteriophage SPBc2 |
| 2682 | BLP02543 conserved hypothetical phage protein | Hypothetical protein [Bacillus licheniformis DSM 13] | UniRef100_Q65ET8 | Bacillus licheniformis DSM 13 |
| 2683 | blyAB N-acetylmuramoyl-L-alanine amidase | N-acetylmuramoyl-L-alanine amidase blyA [Bacillus subtilis] | UniRef100_O31982 | Bacillus subtilis |
| 2684 | BLP02545 hypothetical protein | | | |
| 2685 | BLP04764 putative holin | Holin [Staphylococcus aureus phage phi 13] | UniRef100_Q8SDK0 | Staphylococcus aureus phage phi 13 |
| 2686 | BLP02546 hypothetical protein | | | |
| 2687 | BLP02547 putative response regulator aspartate | Hypothetical protein [Bacillus licheniformis DSM 13] | UniRef100_Q65FD0 | Bacillus licheniformis DSM 13 |
| | phosphatase | | | |
| 2688 | BLP02548 Putative macrolide-efflux determinant | Putative macrolide-efflux determinant, YvqJ [Bacillus subtilis] | UniRef100_O32203 | Bacillus subtilis |
| 2689 | BLP02549 hypothetical protein | | | |
| 2690 | BLP02550 conserved hypothetical protein | Hypothetical protein [Bacillus licheniformis DSM 13] | UniRef100_Q65J66 | Bacillus licheniformis DSM 13 |
| 2691 | BLP02551 conserved hypothetical protein | Hypothetical protein yobK [Bacillus subtilis] | UniRef100_O34596 | Bacillus subtilis |
| 2692 | yobK conserved hypothetical protein YobK | Hypothetical protein yobK [Bacillus subtilis] | UniRef100_O34596 | Bacillus subtilis |
| 2693 | BLP04892 conserved hypothetical | TopI homolog [Bacillus subtilis] | UniRef100_O34330 | Bacillus subtilis |
| 2694 | BLP02552 conserved hypothetical protein | Hypothetical protein [Bacillus licheniformis DSM 13] | UniRef100_Q65L46 | Bacillus licheniformis DSM 13 |
| 2695 | BLP02553 putative transposase | YeeF [Bacillus licheniformis DSM 13] | UniRef100_Q65L45 | Bacillus licheniformis DSM 13 |
| 2696 | yokH YokH | Hypothetical protein yokH [Bacteriophage SPBc2] | UniRef100_O64022 | Bacteriophage SPBc2 |
| 2697 | BLP02555 conserved hypothetical protein | | | |
| 2698 | BLP02557 similar to SpoIVCA protein | UPI00003CC102 UniRef100 entry | UniRef100_UPI00003CC102 | |
| 2699 | | KamA [Bacillus licheniformis DSM 13] | UniRef100_Q65IE0 | Bacillus licheniformis DSM 13 |
| 2700 | yodP GCN5-related N-acetyltransferase | YodP [Bacillus licheniformis DSM 13] | UniRef100_Q65ID9 | Bacillus licheniformis DSM 13 |
| 2701 | yodQ Acetylornithine deacetylase YodQ | YodQ [Bacillus licheniformis DSM 13] | UniRef100_Q65ID8 | Bacillus licheniformis DSM 13 |
| 2702 | yodR Coenzyme A transferase YodR | YodR [Bacillus licheniformis DSM 13] | UniRef100_Q65ID7 | Bacillus licheniformis DSM 13 |
| 2703 | yodS Acetate CoA-transferase, subunit A | YodS [Bacillus licheniformis DSM 13] | UniRef100_Q65ID6 | Bacillus licheniformis DSM 13 |
| 2704 | yodT Aminotransferase class-III protein YodT | YodT (Aminotransferase class-III, Blue (Type 1) copper | UniRef100_Q65ID5 | Bacillus licheniformis DSM 13 |
| | | domain) [Bacillus licheniformis DSM 13] | | |
| 2705 | BLP02564 Major facilitator superfamily protein | Hypothetical protein [Bacillus licheniformis DSM 13] | UniRef100_Q65ID4 | Bacillus licheniformis DSM 13 |
| 2706 | BLP02565 conserved hypothetical protein | | | |
| 2707 | cgeE CgeE | Hypothetical protein cgeE [Bacillus licheniformis DSM 13] | UniRef100_Q65ID3 | Bacillus licheniformis DSM 13 |
| 2708 | BLP02567 hypothetical protein | | | |
| 2709 | msrB conserved protein MsrB | YppQ [Bacillus licheniformis DSM 13] | UniRef100_Q65ID2 | Bacillus licheniformis DSM 13 |
| 2710 | msrA peptidyl methionine sulfoxide reductase | MsrA [Bacillus licheniformis DSM 13] | UniRef100_Q65ID1 | Bacillus licheniformis DSM 13 |
| 2711 | ypoP hypothetical DNA-binding protein YpoP | YpoP [Bacillus licheniformis DSM 13] | UniRef100_Q65ID0 | Bacillus licheniformis DSM 13 |
| 2712 | BLP02571 conserved hypothetical protein | Hypothetical protein [Bacillus licheniformis DSM 13] | UniRef100_Q65IC9 | Bacillus licheniformis DSM 13 |
| 2713 | yhcK GGDEF-domain containing protein | YhcK [Bacillus licheniformis DSM 13] | UniRef100_Q65IC8 | Bacillus licheniformis DSM 13 |
| 2714 | ypnP putative Multi antimicrobial extrusion protein | YpnP [Bacillus licheniformis DSM 13] | UniRef100_Q65IC7 | Bacillus licheniformis DSM 13 |
| | YpnP | | | |
| 2715 | BLP02574 conserved hypothetical protein | Hypothetical protein [Bacillus licheniformis DSM 13] | UniRef100_Q65IC6 | Bacillus licheniformis DSM 13 |
| 2716 | ypmT YpmT | YpmT [Bacillus licheniformis DSM 13] | UniRef100_Q65IC5 | Bacillus licheniformis DSM 13 |
| 2717 | BLP02576 hypothetical protein | | | |
| 2718 | ypmS conserved protein YpmS | Hypothetical protein ypmS [Bacillus licheniformis DSM 13] | UniRef100_Q65IC4 | Bacillus licheniformis DSM 13 |
| 2719 | ypmR conserved protein YpmR | YpmR [Bacillus licheniformis DSM 13] | UniRef100_Q65IC3 | Bacillus licheniformis DSM 13 |
| 2720 | BLP04765 hypothetical protein | | | |
| 2721 | ypmQ conserved hypothetical YpmQ | YpmQ [Bacillus licheniformis DSM 13] | UniRef100_Q65IC2 | Bacillus licheniformis DSM 13 |
| 2722 | degVA DegVA | Hypothetical protein [Bacillus licheniformis DSM 13] | UniRef100_Q65IC1 | Bacillus licheniformis DSM 13 |
| 2723 | BLP02581 hypothetical protein | | | |
| 2724 | ypmP conserved protein YpmP | Hypothetical protein ypmP [Bacillus licheniformis DSM 13] | UniRef100_Q65IC0 | Bacillus licheniformis DSM 13 |
| 2725 | ilvA threonine dehydratase | IlvA [Bacillus licheniformis DSM 13] | UniRef100_Q65IB9 | Bacillus licheniformis DSM 13 |
| 2726 | yplP putative sigma L dependent transcriptional | YplP [Bacillus licheniformis DSM 13] | UniRef100_D65IB8 | Bacillus licheniformis DSM 13 |
| | regulator YplP | | | |
| 2727 | yplQ putative membrane protein YplQ | YplQ [Bacillus licheniformis DSM 13] | UniRef100_Q65IB7 | Bacillus licheniformis DSM 13 |
| 2728 | ypkP conserved hypothetical protein ypkP | YpkP [Bacillus licheniformis DSM 13] | UniRef100_Q65IB6 | Bacillus licheniformis DSM 13 |
| 2729 | dfrA dihydrofolate reductase | DfrA [Bacillus licheniformis DSM 13] | UniRef100_Q65IB5 | Bacillus licheniformis DSM 13 |
| 2730 | BLP02588 hypothetical protein | | | |
| 2731 | ypjQ YpjQ | YpjQ [Bacillus licheniformis DSM 13] | UniRef100_Q65IB4 | Bacillus licheniformis DSM 13 |
| 2732 | ypjP conserved hypothetical protein YpjP | YpjP [Bacillus licheniformis DSM 13] | UniRef100_Q65IB3 | Bacillus licheniformis DSM 13 |
| 2733 | BLP04893 hypothetical protein | | | |
| 2734 | ypiP putative methyltransferase | YpiP [Bacillus licheniformis DSM 13] | UniRef100_Q65IB2 | Bacillus licheniformis DSM 13 |
| 2735 | yphP conserved hypothetical protein YphP | YphP [Bacillus licheniformis DSM 13] | UniRef100_Q65IB1 | Bacillus licheniformis DSM 13 |
| 2736 | ilvD dihydroxy-acid dehydratase | IlvD [Bacillus licheniformis DSM 13] | UniRef100_Q65IB0 | Bacillus licheniformis DSM 13 |
| 2737 | BLP02594 Rhodopsin-like GPCR superfamily protein | YpgR [Bacillus licheniformis DSM 13] | UniRef100_Q65IA9 | Bacillus licheniformis DSM 13 |
| 2738 | BLP02595 Metal-dependent phosphohydrolase, HD | YpgQ [Bacillus licheniformis DSM 13] | UniRef100_Q65IA8 | Bacillus licheniformis DSM 13 |
| | domain protein | | | |
| 2739 | bsaA glutathione peroxidase | BsaA [Bacillus licheniformis DSM 13] | UniRef100_Q65IA7 | Bacillus licheniformis DSM 13 |
| 2740 | BLP02597 Formate tetrahydrofolate ligase | Hypothetical Formate-tetrahydrofolate ligase, | UniRef100_Q62TQ7 | Bacillus licheniformis DSM 13 |
| | | FTHFS, Formate-tetrahydrofolate ligase, FTHFS [Bacillus | | |
| | | licheniformis DSM 13] | | |
| 2741 | metA homoserine O-succinyltransferase | MetA [Bacillus licheniformis DSM 13] | UniRef100_Q65IA5 | Bacillus licheniformis DSM 13 |
| 2742 | ugtP putative Glycosyl Tranferase Family 28 | UgtP [Bacillus licheniformis DSM 13] | UniRef100_Q65IA4 | Bacillus licheniformis DSM 13 |
| 2743 | BLP02600 conserved hypothetical protein | Hypothetical protein [Bacillus licheniformis DSM 13] | UniRef100_Q65IA3 | Bacillus licheniformis DSM 13 |
| 2744 | cspD cold-shock protein | CspD [Bacillus licheniformis DSM 13] | UniRef100_Q65IA2 | Bacillus licheniformis DSM 13 |
| 2745 | degR DegR | Hypothetical protein degR [Bacillus licheniformis DSM 13] | UniRef100_Q65IA1 | Bacillus licheniformis DSM 13 |
| 2746 | ypzA conserved hypothetical protein YpzA | Hypothetical protein [Bacillus licheniformis DSM 13] | UniRef100_Q62TQ1 | Bacillus licheniformis DSM 13 |
| 2747 | ypeQ conserved hypothetical protein YpeQ | Hypothetical protein [Bacillus licheniformis DSM 13] | UniRef100_Q62TQ0 | Bacillus licheniformis DSM 13 |
| 2748 | yqeP conserved putative sugar transporter YqeP | YpeP [Bacillus licheniformis DSM 13] | UniRef100_Q65I98 | Bacillus licheniformis DSM 13 |
| 2749 | ypdP conserved protein YpdP | Hypothetical protein ypdP [Bacillus licheniformis DSM 13] | UniRef100_Q65I97 | Bacillus licheniformis DSM 13 |
| 2750 | mhA putative ribonuclease H | YpdQ [Bacillus licheniformis DSM 13] | UniRef100_Q65I96 | Bacillus licheniformis DSM 13 |
| 2751 | sspL Small, acid-soluble spore protein L (SASP L) | SspL [Bacillus licheniformis DSM 13] | UniRef100_Q65I95 | Bacillus licheniformis DSM 13 |
| | SspL | | | |
| 2752 | ypcP putative 5′-3′ exonuclease | YpcP [Bacillus licheniformis DSM 13] | UniRef100_Q65I94 | Bacillus licheniformis DSM 13 |
| 2753 | BLP02610 conserved hypothetical protein | Hypothetical protein [Bacillus licheniformis DSM 13] | UniRef100_Q65I93 | Bacillus licheniformis DSM 13 |
| 2754 | ypbS conserved protein YpbS | Hypothetical protein ypbS [Bacillus licheniformis DSM 13] | UniRef100_Q65I92 | Bacillus licheniformis DSM 13 |
| 2755 | ypbR conserved protein YpbR | Hypothetical protein ypbR [Bacillus licheniformis DSM 13] | UniRef100_Q65I91 | Bacillus licheniformis DSM 13 |
| 2756 | BLP02613 hypothetical protein | Hypothetical protein [Bacillus licheniformis DSM 13] | UniRef100_Q62TP2 | Bacillus licheniformis DSM 13 |
| 2757 | ypbQ Isoprenylcysteine carboxyl methyltransferase | YpbQ [Bacillus licheniformis DSM 13] | UniRef100_Q65I90 | Bacillus licheniformis DSM 13 |
| 2758 | bcsA naringenin-chalcone synthase | BcsA [Bacillus licheniformis DSM 13] | UniRef100_Q65I89 | Bacillus licheniformis DSM 13 |
| 2759 | yokL putative N-acetyltransferase | Hypothetical protein [Bacillus licheniformis DSM 13] | UniRef100_Q65I88 | Bacillus licheniformis DSM 13 |
| 2760 | pbuX xanthine permease | PbuX [Bacillus licheniformis DSM 13] | UniRef100_Q65I87 | Bacillus licheniformis DSM 13 |
| 2761 | xpt xanthine phosphoribosyltransferase | Xpt [Bacillus licheniformis DSM 13] | UniRef100_Q65I86 | Bacillus licheniformis DSM 13 |
| 2762 | BLP02619 hypothetical protein | | | |
| 2763 | ypwA putative metallocarboxypeptidase YpwA | YpwA [Bacillus licheniformis DSM 13] | UniRef100_Q65I85 | Bacillus licheniformis DSM 13 |
| 2764 | ypvA Probable ATP-dependent helicase | Helicase c2 [Bacillus licheniformis DSM 13] | UniRef100_Q62TN5 | Bacillus licheniformis DSM 13 |
| 2765 | BLP02622 hypothetical protein | Hypothetical protein [Bacillus licheniformis DSM 13] | UniRef100_Q65I83 | Bacillus licheniformis DSM 13 |
| 2766 | BLP02623 conserved hypothetical protein | Hypothetical protein [Bacillus licheniformis DSM 13] | UniRef100_Q65I82 | Bacillus licheniformis DSM 13 |
| 2767 | ypsC Putative RNA methylase | YpsC [Bacillus licheniformis DSM 13] | UniRef100_Q65I81 | Bacillus licheniformis DSM 13 |
| 2768 | ypsB conserved hypothetical protein YpsB | YpsB [Bacillus licheniformis DSM 13] | UniRef100_Q65I80 | Bacillus licheniformis DSM 13 |
| 2769 | ypsA conserved hypothetical protein YpsA | YpsA [Bacillus licheniformis DSM 13] | UniRef100_Q65I79 | Bacillus licheniformis DSM 13 |
| 2770 | cotD spore coat protein (inner) | CotD [Bacillus licheniformis DSM 13] | UniRef100_Q65I78 | Bacillus licheniformis DSM 13 |
| 2771 | BLP04894 conserved hypothetical protein | | | |
| 2772 | yprB conserved hypothetical protein YprB | YprB [Bacillus licheniformis DSM 13] | UniRef100_Q65I77 | Bacillus licheniformis DSM 13 |
| 2773 | yprA putative ATP dependent helicase YprA | YprA [Bacillus licheniformis DSM 13] | UniRef100_Q65I76 | Bacillus licheniformis DSM 13 |
| 2774 | ypqE Putative PTS system IIA component YpqE | YpqE [Bacillus licheniformis DSM 13] | UniRef100_Q65I75 | Bacillus licheniformis DSM 13 |
| 2775 | ypqA conserved hypothetical protein YpqA | YpqA [Bacillus licheniformis DSM 13] | UniRef100_Q65I74 | Bacillus licheniformis DSM 13 |
| 2776 | ypqG conserved hypothetical protein YpqG | Hypothetical protein [Bacillus licheniformis DSM 13] | UniRef100_Q65I73 | Bacillus licheniformis DSM 13 |
| 2777 | yppF conserved hypothetical protein YppF | YppF [Bacillus licheniformis DSM 13] | UniRef100_Q65I72 | Bacillus licheniformis DSM 13 |
| 2778 | yppE conserved hypothetical protein YppE | Hypothetical protein [Bacillus licheniformis DSM 13] | UniRef100_Q62TM1 | Bacillus licheniformis DSM 13 |
| 2779 | yppD conserved hypothetical protein YppD | Hypothetical protein [Bacillus licheniformis DSM 13] | UniRef100_Q65I70 | Bacillus licheniformis DSM 13 |
| 2780 | sspM small acid-soluble spore protein | Small acid-soluble spore protein [Bacillus licheniformis DSM | UniRef100_Q62TL9 | Bacillus licheniformis DSM 13 |
| | | 13] | | |
| 2781 | yppC conserved hypothetical protein YppC | YppC [Bacillus licheniformis DSM 13] | UniRef100_Q65I69 | Bacillus licheniformis DSM 13 |
| 2782 | recU RecU | Hypothetical protein recU [Bacillus licheniformis DSM 13] | UniRef100_Q65I68 | Bacillus licheniformis DSM 13 |
| 2783 | ponA penicillin-binding proteins, Glycosyl Transferase | PonA [Bacillus licheniformis DSM 13] | UniRef100_Q65I67 | Bacillus licheniformis DSM 13 |
| | Family 51 | | | |
| 2784 | ypoC conserved hypothetical protein YpoC | YpoC [Bacillus licheniformis DSM 13] | UniRef100_Q65I66 | Bacillus licheniformis DSM 13 |
| 2785 | nth endonuclease III | Nth [Bacillus licheniformis DSM 13] | UniRef100_Q65I65 | Bacillus licheniformis DSM 13 |
| 2786 | dnaD DnaD | Hypothetical protein dnaD [Bacillus licheniformis DSM 13] | UniRef100_Q65I64 | Bacillus licheniformis DSM 13 |
| 2787 | asnS asparaginyl-tRNA synthetase | AsnS [Bacillus licheniformis DSM 13] | UniRef100_Q65I63 | Bacillus licheniformis DSM 13 |
| 2788 | aspB aspartate aminotransferase | AspB [Bacillus licheniformis DSM 13] | UniRef100_Q65I62 | Bacillus licheniformis DSM 13 |
| 2789 | ypmB conserved protein YpmB | Hypothetical protein ypmB [Bacillus licheniformis DSM 13] | UniRef100_Q65I61 | Bacillus licheniformis DSM 13 |
| 2790 | ypmA conserved protein YpmA | Hypothetical protein ypmA [Bacillus licheniformis DSM 13] | UniRef100_Q65I60 | Bacillus licheniformis DSM 13 |
| 2791 | dinG ATP-dependent helicase | DinG [Bacillus licheniformis DSM 13] | UniRef100_Q65I59 | Bacillus licheniformis DSM 13 |
| 2792 | panD aspartate 1-decarboxylase | PanD [Bacillus licheniformis DSM 13] | UniRef100_Q65I58 | Bacillus licheniformis DSM 13 |
| 2793 | panC pantothenate synthetase | PanC [Bacillus licheniformis DSM 13] | UniRef100_Q65I57 | Bacillus licheniformis DSM 13 |
| 2794 | panB ketopantoate hydroxymethyltransferase | PanB [Bacillus licheniformis DSM 13] | UniRef100_Q65I56 | Bacillus licheniformis DSM 13 |
| 2795 | BLP02651 hypothetical protein | | | |
| 2796 | birA transcriptional regulator and biotin acetyl-CoA- | BirA [Bacillus licheniformis DSM 13] | UniRef100_Q65I55 | Bacillus licheniformis DSM 13 |
| | carboxylase synthetase | | | |
| 2797 | cca tRNA nucleotidyltransferase | Cca [Bacillus licheniformis DSM 13] | UniRef100_Q65I54 | Bacillus licheniformis DSM 13 |
| 2798 | ypjH Glycosyl transferase, Family 4, YpjH | YpjH [Bacillus licheniformis DSM 13] | UniRef100_Q65I53 | Bacillus licheniformis DSM 13 |
| 2799 | ypjG putative carbohydrate esterase Family 14 YpjG | LmbE-like protein [Bacillus licheniformis DSM 13] | UniRef100_Q62TK1 | Bacillus licheniformis DSM 13 |
| 2800 | mgsA methylglyoxal synthase | MgsA [Bacillus licheniformis DSM 13] | UniRef100_Q65I51 | Bacillus licheniformis DSM 13 |
| 2801 | dapB dihydrodipicolinate reductase | DapB [Bacillus licheniformis DSM 13] | UniRef100_Q65I50 | Bacillus licheniformis DSM 13 |
| 2802 | ypjD conserved hypothetical protein YpjD | YpjD [Bacillus licheniformis DSM 13] | UniRef100_Q65I49 | Bacillus licheniformis DSM 13 |
| 2803 | ypjC conserved hypothetical protein | YpjC [Bacillus licheniformis DSM 13] | UniRef100_Q65I48 | Bacillus licheniformis DSM 13 |
| 2804 | ypjB conserved hypothetical protein YpjB | YpjB [Bacillus licheniformis DSM 13] | UniRef100_Q65I47 | Bacillus licheniformis DSM 13 |
| 2805 | ypjA conserved hypothetical protein YpjA | Hypothetical protein [Bacillus licheniformis DSM 13] | UniRef100_Q62TJ5 | Bacillus licheniformis DSM 13 |
| 2806 | BLP02662 hypothetical protein | | | |
| 2807 | qcrC menaquinol:cytochrome c oxidoreductase | QcrC [Bacillus licheniformis DSM 13] | UniRef100_Q65I45 | Bacillus licheniformis DSM 13 |
| | (cytochrome b_c subunit) | | | |
| 2808 | qcrB menaquinol:cytochrome c oxidoreductase | QcrB [Bacillus licheniformis DSM 13] | UniRef100_Q65I44 | Bacillus licheniformis DSM 13 |
| | (cytochrome b subunit) | | | |
| 2809 | qcrA menaquinol:cytochrome c oxidoreductase (iron- | QcrA [Bacillus licheniformis DSM 13] | UniRef100_Q65I43 | Bacillus licheniformis DSM 13 |
| | sulfur subunit) | | | |
| 2810 | ypiF conserved hypothetical protein YpiF | YpiF [Bacillus licheniformis DSM 13] | UniRef100_Q65I42 | Bacillus licheniformis DSM 13 |
| 2811 | ypiB conserved hypothetical protein | YpiB [Bacillus licheniformis DSM 13] | UniRef100_Q65I41 | Bacillus licheniformis DSM 13 |
| 2812 | ypiA TPR-repeat containing conserved hypothetical | YpiA [Bacillus licheniformis DSM 13] | UniRef100_Q65I40 | Bacillus licheniformis DSM 13 |
| | protein | | | |
| 2813 | BLP02669 hypothetical protein | | | |
| 2814 | aroE 5-enolpyruvoylshikimate-3-phosphate synthase | AroE [Bacillus licheniformis DSM 13] | UniRef100_Q65I39 | Bacillus licheniformis DSM 13 |
| 2815 | tyrA prephenate dehydrogenase | TyrA [Bacillus licheniformis DSM 13] | UniRef100_Q65I38 | Bacillus licheniformis DSM 13 |
| 2816 | hisC histidinol-phosphate aminotransferase and | HisC [Bacillus licheniformis DSM 13] | UniRef100_Q65I37 | Bacillus licheniformis DSM 13 |
| | tyrosine_phenylalanine aminotransferase | | | |
| 2817 | trpA tryptophan synthase (alpha subunit) | TrpA [Bacillus licheniformis DSM 13] | UniRef100_Q65I36 | Bacillus licheniformis DSM 13 |
| 2818 | trpB tryptophan synthase (beta subunit) | TrpB [Bacillus licheniformis DSM 13] | UniRef100_Q65I35 | Bacillus licheniformis DSM 13 |
| 2819 | trpF phosphoribosyl anthranilate isomerase | TrpF [Bacillus licheniformis DSM 13] | UniRef100_Q65I34 | Bacillus licheniformis DSM 13 |
| 2820 | trpC indol-3-glycerol phosphate synthase | TrpC [Bacillus licheniformis DSM 13] | UniRef100_Q65I33 | Bacillus licheniformis DSM 13 |
| 2821 | trpD anthranilate phosphoribosyltransferase | TrpD [Bacillus licheniformis DSM 13] | UniRef100_Q65I32 | Bacillus licheniformis DSM 13 |
| 2822 | trpE anthranilate synthase | TrpE [Bacillus licheniformis DSM 13] | UniRef100_Q65I31 | Bacillus licheniformis DSM 13 |
| 2823 | aroH chorismate mutase (isozymes 1 and 2) | AroH [Bacillus licheniformis DSM 13] | UniRef100_Q65I30 | Bacillus licheniformis DSM 13 |
| 2824 | aroB 3-dehydroquinate synthase | AroB [Bacillus licheniformis DSM 13] | UniRef100_Q65I29 | Bacillus licheniformis DSM 13 |
| 2825 | aroF chorismate synthase | AroF [Bacillus licheniformis DSM 13] | UniRef100_Q65I28 | Bacillus licheniformis DSM 13 |
| 2826 | cheR methyl-accepting chemotaxis proteins (MCPs) | CheR (Methyl-accepting chemotaxis proteins (MCPs) | UniRef100_Q65I27 | Bacillus licheniformis DSM 13 |
| | methyltransferase | methyltransferase) [Bacillus licheniformis DSM 13] | | |
| 2827 | ndk nucleoside diphosphate kinase | Ndk [Bacillus licheniformis DSM 13] | UniRef100_Q65I26 | Bacillus licheniformis DSM 13 |
| 2828 | hepT heptaprenyl diphosphate synthase component II | HepT [Bacillus licheniformis DSM 13] | UniRef100_Q65I25 | Bacillus licheniformis DSM 13 |
| 2829 | menH methyltransferase | MenH [Bacillus licheniformis DSM 13] | UniRef100_Q65I24 | Bacillus licheniformis DSM 13 |
| 2830 | hepS heptaprenyl diphosphate synthase component I | HepS [Bacillus licheniformis DSM 13] | UniRef100_Q65I23 | Bacillus licheniformis DSM 13 |
| 2831 | mtrB tryptophan operon RNA-binding attenuation | MtrB [Bacillus lichenifomils DSM 13] | UniRef100_Q65I22 | Bacillus licheniformis DSM 13 |
| | protein (TRAP) | | | |
| 2832 | mtrA GTP cyclohydrolase I | MtrA [Bacillus licheniformis DSM 13] | UniRef100_Q65I21 | Bacillus licheniformis DSM 13 |
| 2833 | hbs non-specific DNA-binding protein HBsu signal | Hbs (Non-specific DNA-binding protein HBsu signal | UniRef100_Q65I20 | Bacillus licheniformis DSM 13 |
| | recognition particle-like (SRP) component | recognition particle-like (SRP) component) [Bacillus | | |
| | | licheniformis DSM 13] | | |
| 2834 | BLP04766 hypothetical protein | | | |
| 2835 | BLP02690 hypothetical protein | | | |
| 2836 | spoIVA Sporulation Stage IV protein A SpoIVA | Hypothetical protein spoIVA [Bacillus licheniformis DSM 13] | UniRef100_Q65I19 | Bacillus licheniformis DSM 13 |
| 2837 | yphF conserved hypothetical protein YphF | YphF [Bacillus licheniformis DSM 13] | UniRef100_Q65I18 | Bacillus licheniformis DSM 13 |
| 2838 | yphE conserved hypothetical protein YphE | YphE [Bacillus licheniformis DSM 13] | UniRef100_Q65I17 | Bacillus licheniformis DSM 13 |
| 2839 | gpsA NAD(P)H-dependent glycerol-3-phosphate | GpsA (NAD(P)H-dependent glycerol-3-phosphate | UniRef100_Q65I16 | Bacillus licheniformis DSM 13 |
| | dehydrogenase | dehydrogenase) [Bacillus licheniformis DSM 13] | | |
| 2840 | engA GTP-binding protein essential for cell growth | YphC [Bacillus licheniformis DSM 13] | UniRef100_Q65I15 | Bacillus licheniformis DSM 13 |
| 2841 | BLP02696 hypothetical protein | | | |
| 2842 | BLP02697 conserved hypothetical protein | Hypothetical protein [Bacillus licheniformis DSM 13] | UniRef100_Q65I14 | Bacillus licheniformis DSM 13 |
| 2843 | seaA hypothetical protein | Hypothetical protein seaA [Bacillus licheniformis DSM 13] | UniRef100_Q65I13 | Bacillus licheniformis DSM 13 |
| 2844 | yphA conserved hypothetical protein YphA | YphA [Bacillus licheniformis DSM 13] | UniRef100_Q65I12 | Bacillus licheniformis DSM 13 |
| 2845 | BLP02700 hypothetical protein | Hypothetical protein [Bacillus licheniformis DSM 13] | UniRef100_Q65I11 | Bacillus licheniformis DSM 13 |
| 2846 | fni FMN_related compound-binding protein | FMN/related compound-binding core [Bacillus licheniformis | UniRef100_Q62TF8 | Bacillus licheniformis DSM 13 |
| | | DSM 13] | | |
| 2847 | ypfD 30S ribosomal protein S1 homolog, Nucleic acid- | YpfD [Bacillus licheniformis DSM 13] | UniRef100_Q65I09 | Bacillus licheniformis DSM 13 |
| | binding protein YpfD | | | |
| 2848 | cmk cytidylate kinase | Cmk [Bacillus licheniformis DSM 13] | UniRef100_Q65I08 | Bacillus licheniformis DSM 13 |
| 2849 | ypfD conserved hypothetical protein YpfD | YpfB [Bacillus licheniformis DSM 13] | UniRef100_Q65I07 | Bacillus licheniformis DSM 13 |
| 2850 | BLP02705 hypothetical protein | | | |
| 2851 | ybeB putative metallopeptidase YpeB | YpeB [Bacillus licheniformis DSM 13] | UniRef100_Q65I06 | Bacillus licheniformis DSM 13 |
| 2852 | sleB spore cortex-lytic enzyme | SleB [Bacillus licheniformis DSM 13] | UniRef100_Q65I05 | Bacillus licheniformis DSM 13 |
| 2853 | ypdC hypothetical protein | YpdC [Bacillus licheniformis DSM 13] | UniRef100_Q65I04 | Bacillus licheniformis DSM 13 |
| 2854 | BLP02710 L-asparaginase | Hypothetical protein [Bacillus licheniformis DSM 13] | UniRef100_Q65I03 | Bacillus licheniformis DSM 13 |
| 2855 | ypdA thioredoxin oxidoreductase YpdA | YpdA [Bacillus licheniformis DSM 13] | UniRef100_Q65I02 | Bacillus licheniformis DSM 13 |
| 2856 | gudB glutamate dehydrogenase | GudB [Bacillus licheniformis DSM 13] | UniRef100_Q65I01 | Bacillus licheniformis DSM 13 |
| 2857 | mecB Negative regulator of genetic competence | YpbH [Bacillus licheniformis DSM 13] | UniRef100_Q65I00 | Bacillus licheniformis DSM 13 |
| 2858 | ypbG putative hydrolase YpbG | YpbG [Bacillus licheniformis DSM 13] | UniRef100_Q65HZ9 | Bacillus licheniformis DSM 13 |
| 2859 | ypbF conserved hypothetical protein YpbF | YpbF [Bacillus licheniformis DSM 13] | UniRef100_Q65HZ8 | Bacillus licheniformis DSM 13 |
| 2860 | ypbE Peptidoglycan-binding protein YpbE | YpbE [Bacillus licheniformis DSM 13] | UniRef100_Q65HZ7 | Bacillus licheniformis DSM 13 |
| 2861 | ypbD conserved hypothetical protein YpbD | YpbD [Bacillus licheniformis DSM 13] | UniRef100_Q65HZ6 | Bacillus licheniformis DSM 13 |
| 2862 | recQ ATP-dependent DNA helicase RecQ | RecQ [Bacillus licheniformis DSM 13] | UniRef100_Q65HZ5 | Bacillus licheniformis DSM 13 |
| 2863 | ypbB Bipartite response regulator, C-terminal effector | YpbB [Bacillus licheniformis DSM 13] | UniRef100_Q65HZ4 | Bacillus licheniformis DSM 13 |
| | YpbB | | | |
| 2864 | fer ferredoxin | Fer [Bacillus licheniformis DSM 13] | UniRef100_Q65HZ3 | Bacillus licheniformis DSM 13 |
| 2865 | BLP02721 putative riboflavin uptake protein YpaA | YpaA [Bacillus licheniformis DSM 13] | UniRef100_Q65HZ2 | Bacillus licheniformis DSM 13 |
| 2866 | BLP02722 hypothetical protein | | | |
| 2867 | BLP02723 hypothetical protein | | | |
| 2868 | serA phosphoglycerate dehydrogenase SerA | SerA [Bacillus licheniformis DSM 13] | UniRef100_Q65HZ1 | Bacillus licheniformis DSM 13 |
| 2869 | BLP02725 putative peptidogycan hydrolase | Hypothetical protein [Bacillus licheniformis DSM 13] | UniRef100_Q65HZ0 | Bacillus licheniformis DSM 13 |
| 2870 | rsiX RsiX | Hypothetical protein rsiX [Bacillus licheniformis DSM 13] | UniRef100_Q65HY9 | Bacillus licheniformis DSM 13 |
| 2871 | sigX RNA polymerase ECF(extracytoplasmic | SigX (RNA polymerase ECF(Extracytoplasmic function)-type | UniRef100_Q65HY8 | Bacillus licheniformis DSM 13 |
| | function)-type sigma factor (sigma-X) | sigma factor) [Bacillus licheniformis DSM 13] | | |
| 2872 | BLP02728 transcriptional regulator | Membrane-bound protein [Bacillus licheniformis DSM 13] | UniRef100_Q62TD6 | Bacillus licheniformis DSM 13 |
| 2873 | yheN Carbohydrate Esterase Family 4, YheN | Hypothetical protein [Bacillus licheniformis DSM 13] | UniRef100_Q65HY6 | Bacillus licheniformis DSM 13 |
| 2874 | BLP02730 hypothetical protein | | | |
| 2875 | BLP02731 conserved hypothetical protein | Hypothetical protein [Bacillus licheniformis DSM 13] | UniRef100_Q65HY5 | Bacillus licheniformis DSM 13 |
| 2876 | yclK two-component sensor histidine kinase YclK | Hypothetical protein [Bacillus licheniformis DSM 13] | UniRef100_Q65HY4 | Bacillus licheniformis DSM 13 |
| 2877 | yclJ two-component response regulator YclJ | Hypothetical protein [Bacillus licheniformis DSM 13] | UniRef100_Q65HY3 | Bacillus licheniformis DSM 13 |
| 2878 | BLP04767 hypothetical protein | | | |
| 2879 | resE two-component sensor histidine kinase ResE | ResE1 [Bacillus licheniformis DSM 13] | UniRef100_Q65HY2 | Bacillus licheniformis DSM 13 |
| 2880 | resD two-component response regulator ResD | ResD [Bacillus licheniformis DSM 13] | UniRef100_Q65HY1 | Bacillus licheniformis DSM 13 |
| 2881 | resC ResC | Hypothetical protein resC [Bacillus licheniformis DSM 13] | UniRef100_Q65HY0 | Bacillus licheniformis DSM 13 |
| 2882 | resB ResB | ResB [Bacillus licheniformis DSM 13] | UniRef100_Q65HX9 | Bacillus licheniformis DSM 13 |
| 2883 | resA essential cytochrome c biogenesis protein | | | |
| 2884 | rluB pseudouridine synthase | Pseudouridine synthase [Bacillus licheniformis DSM 13] | UniRef100_Q62TC6 | Bacillus licheniformis DSM 13 |
| 2885 | spmB spore maturation protein | SpmB [Bacillus licheniformis DSM 13] | UniRef100_Q65HX6 | Bacillus licheniformis DSM 13 |
| 2886 | spmA spore maturation protein | SpmA [Bacillus licheniformis DSM 13] | UniRef100_Q65HX5 | Bacillus licheniformis DSM 13 |
| 2887 | dacB D-alanyl-D-alanine carboxypeptidase (penicillin- | DacB [Bacillus licheniformis DSM 13] | UniRef100_Q65HX4 | Bacillus licheniformis DSM 13 |
| | binding protein 5*) | | | |
| 2888 | ypuI conserved hypothetical protein YpuI | YpuI [Bacillus licheniformis DSM 13] | UniRef100_Q65HX3 | Bacillus licheniformis DSM 13 |
| 2889 | scpB SMC interacting protein | YpuH [Bacillus licheniformis DSM 13] | UniRef100_Q65HX2 | Bacillus licheniformis DSM 13 |
| 2890 | scpA Segregation and condensation protein A ScpA | YpuG [Bacillus licheniformis DSM 13] | UniRef100_Q65HX1 | Bacillus licheniformis DSM 13 |
| 2891 | BLP04937 conserved hypothetical protein | | | |
| 2892 | ypuF conserved hypothetical protein YpuF | YpuF [Bacillus licheniformis DSM 13] | UniRef100_Q65HW9 | Bacillus licheniformis DSM 13 |
| 2893 | ribT reductase | RibT [Bacillus licheniformis DSM 13] | UniRef100_Q65HW8 | Bacillus licheniformis DSM 13 |
| 2894 | ribH riboflavin synthase (beta subunit) | RibH [Bacillus licheniformis DSM 13] | UniRef100_Q65HW7 | Bacillus licheniformis DSM 13 |
| 2895 | ribA GTP cyclohydrolase II and 3,4-dihydroxy-2- | RibA [Bacillus licheniformis DSM 13] | UniRef100_Q65HW6 | Bacillus licheniformis DSM 13 |
| | butanone 4-phosphate synthase | | | |
| 2896 | ribE riboflavin synthase (alpha subunit) | RibE [Bacillus licheniformis DSM 13] | UniRef100_Q65HW5 | Bacillus licheniformis DSM 13 |
| 2897 | ribD riboflavin-specific deaminase | RibD [Bacillus licheniformis DSM 13] | UniRef100_Q65HW4 | Bacillus licheniformis DSM 13 |
| 2898 | BLP02752 hypothetical protein | | | |
| 2899 | ypuD conserved hypothetical protein YpuD | YpuD [Bacillus licheniformis DSM 13] | UniRef100_Q65HW3 | Bacillus licheniformis DSM 13 |
| 2900 | BLP02754 putative phosphatase | Hypothetical protein [Bacillus licheniformis DSM 13] | UniRef100_Q65HW2 | Bacillus licheniformis DSM 13 |
| 2901 | BLP02755 Stress response homolog protein | Hypothetical protein [Bacillus licheniformis DSM 13] | UniRef100_Q65HW1 | Bacillus licheniformis DSM 13 |
| 2902 | BLP02756 conserved hypothetical protein | Hypothetical protein [Bacillus licheniformis DSM 13] | UniRef100_Q65HW0 | Bacillus licheniformis DSM 13 |
| 2903 | rapA response regulator aspartate phosphatase | RapA [Bacillus licheniformis DSM 13] | UniRef100_Q65HV9 | Bacillus licheniformis DSM 13 |
| 2904 | BLP02758 hypothetical protein | | | |
| 2905 | ppiB peptidyl-prolyl isomerase | PpiB [Bacillus licheniformis DSM 13] | UniRef100_Q65HV8 | Bacillus licheniformis DSM 13 |
| 2906 | ypuA conserved hypothetical protein YpuA | YpuA [Bacillus licheniformis DSM 13] | UniRef100_Q65HV7 | Bacillus licheniformis DSM 13 |
| 2907 | yndL conserved hypothetical protein YndL | YndL [Bacillus licheniformis DSM 13] | UniRef100_Q65HV4 | Bacillus licheniformis DSM 13 |
| 2908 | lysA diaminopimelate decarboxylase | LysA [Bacillus licheniformis DSM 13] | UniRef100_Q65HV3 | Bacillus licheniformis DSM 13 |
| 2909 | BLP02764 conserved hypothetical protein | Hypothetical protein [Bacillus licheniformis DSM 13] | UniRef100_Q65HV2 | Bacillus licheniformis DSM 13 |
| 2910 | spoVAF SpoVAF | Hypothetical protein spoVAF [Bacillus licheniformis DSM 13] | UniRef100_Q65HV1 | Bacillus licheniformis DSM 13 |
| 2911 | spoVAE1 Stage V sporulation protein SpoVAE1 | SpoVAE1 [Bacillus licheniformis DSM 13] | UniRef100_Q65HV0 | Bacillus licheniformis DSM 13 |
| 2912 | spoVAE2 Stage V sporulation protein SpoVAE2 | SpoVAE2 [Bacillus licheniformis DSM 13] | UniRef100_Q65HU9 | Bacillus licheniformis DSM 13 |
| 2913 | spoVAD Stage V sporulation protein SpoVAD | Hypothetical protein spoVAD [Bacillus licheniformis DSM 13] | UniRef100_Q65HU8 | Bacillus licheniformis DSM 13 |
| 2914 | spoVAC SpoVAC | SpoVAC [Bacillus licheniformis DSM 13] | UniRef100_Q65HU7 | Bacillus licheniformis DSM 13 |
| 2915 | spoVAB SpoVAB | Hypothetical protein spoVAB [Bacillus licheniformis DSM 13] | UniRef100_Q65HU6 | Bacillus licheniformis DSM 13 |
| 2916 | spoVAA SpoVAA | Stage V sporulation protein AA [Bacillus licheniformis] | UniRef100_Q65HU5 | Bacillus licheniformis |
| 2917 | BLP02771 hypothetical protein | | | |
| 2918 | sigF RNA polymerase sporulation-specific sigma | SigF [Bacillus licheniformis DSM 13] | UniRef100_Q65HU4 | Bacillus licheniformis DSM 13 |
| | factor (sigma-F) | | | |
| 2919 | spoIIAB anti-sigma factor (antagonist of sigma-F) and | Anti-sigma F factor [Bacillus licheniformis] | UniRef100_P26778 | Bacillus licheniformis |
| | serine kinase | | | |
| 2920 | spoIIAA anti-anti-sigma factor (antagonist of spoIIAB) | SpoIIAA [Bacillus licheniformis DSM 13] | UniRef100_Q65HU2 | Bacillus licheniformis DSM 13 |
| 2921 | dacF penicilin binding protein (putative D-alanyl-D- | Penicilin binding protein [Bacillus licheniformis DSM 13] | UniRef100_Q62T91 | Bacillus licheniformis DSM 13 |
| | alanine carboxypeptidase) | | | |
| 2922 | punA purine nucleoside phosphorylase | PunA [Bacillus licheniformis DSM 13] | UniRef100_Q65HU0 | Bacillus licheniformis DSM 13 |
| 2923 | drm phosphopentomutase | Drm [Bacillus licheniformis DSM 13] | UniRef100_Q65HT9 | Bacillus licheniformis DSM 13 |
| 2924 | ripX site-specific integrase_recombinase | RipX [Bacillus licheniformis DSM 13] | UniRef100_Q65HT8 | Bacillus licheniformis DSM 13 |
| 2925 | BLP02779 conserved hypothetical protein | Hypothetical protein [Bacillus licheniformis DSM 13] | UniRef100_Q65HT7 | Bacillus licheniformis DSM 13 |
| 2926 | fur transcriptional regulator | Fur family [Bacillus licheniformis DSM 13] | UniRef100_Q65HT6 | Bacillus licheniformis DSM 13 |
| 2927 | spoIIM SpoIIM | Hypothetical protein spoIIM [Bacillus licheniformis DSM 13] | UniRef100_Q65HT5 | Bacillus licheniformis DSM 13 |
| 2928 | BLP02782 PTS lactose_cellobiose IIC component | YdhO [Bacillus licheniformis DSM 13] | UniRef100_Q65HT4 | Bacillus licheniformis DSM 13 |
| 2929 | BLP02783 Phosphotransferase system, | Hypothetical protein [Bacillus licheniformis DSM 13] | UniRef100_Q65HT3 | Bacillus licheniformis DSM 13 |
| | lactose_cellobiose-specific IIB subunit | | | |
| 2930 | BLP02784 putative allantoin permease | Probable allantoin permease [Bacillus subtilis] | UniRef100_P94575 | Bacillus subtilis |
| 2931 | BLP02785 GCN5-related N-acetyltransferase | Hypothetical protein [Bacillus licheniformis DSM 13] | UniRef100_Q65HT0 | Bacillus licheniformis DSM 13 |
| 2932 | yqkK conserved hypothetical protein yqkK | Hypothetical protein yqkK [Bacillus subtilis] | UniRef100_P54573 | Bacillus subtilis |
| 2933 | yybD probable acetyltransferase YybD | GCN5-related N-acetyltransferase [Bacillus licheniformis DSM | UniRef100_Q62T81 | Bacillus licheniformis DSM 13 |
| | | 13] | | |
| 2934 | yqxK conserved protein YqxK | Hypothetical protein yqxK [Bacillus licheniformis DSM 13] | UniRef100_Q65HS8 | Bacillus licheniformis DSM 13 |
| 2935 | nudF ADP-ribose pyrophosphatase | NudF [Bacillus licheniformis DSM 13] | UniRef100_Q65HS7 | Bacillus licheniformis DSM 13 |
| 2936 | BLP02789 conserved hypothetical protein | Hypothetical protein [Bacillus licheniformis DSM 13] | UniRef100_Q65HS6 | Bacillus licheniformis DSM 13 |
| 2937 | ydgC conserved hypothetical protein YdgC | YdgC [Bacillus licheniformis DSM 13] | UniRef100_Q65HS5 | Bacillus licheniformis DSM 13 |
| 2938 | ydgD conserved hypothetical protein YdgD | YdgD [Bacillus licheniformis DSM 13] | UniRef100_Q65HS4 | Bacillus licheniformis DSM 13 |
| 2939 | yqkF Aldo_keto reductase YqkF | YqkF [Bacillus licheniformis DSM 13] | UniRef100_Q65HS3 | Bacillus licheniformis DSM 13 |
| 2940 | yqkE conserved hypothetical protein YqkE | YqkE [Bacillus licheniformis DSM 13] | UniRef100_Q65HS1 | Bacillus licheniformis DSM 13 |
| 2941 | yqkD conserved protein YqkD | YqkD [Bacillus licheniformis DSM 13] | UniRef100_Q65HS0 | Bacillus licheniformis DSM 13 |
| 2942 | yqkC YqkC | Hypothetical protein yqkC [Bacillus licheniformis DSM 13] | UniRef100_Q65HR9 | Bacillus licheniformis DSM 13 |
| 2943 | yqkB conserved protein YqkB | Hypothetical protein yqkB [Bacillus licheniformis DSM 13] | UniRef100_Q65HR8 | Bacillus licheniformis DSM 13 |
| 2944 | BLP02797 conserved hypothetical protein | Hypothetical protein [Bacillus licheniformis DSM 13] | UniRef100_Q65HR7 | Bacillus licheniformis DSM 13 |
| 2945 | yqkA probable acetyltransferase YqkA | Hypothetical protein yqkA [Bacillus licheniformis DSM 13] | UniRef100_Q65HR6 | Bacillus licheniformis DSM 13 |
| 2946 | yqjZ conserved protein YqjZ | YqjZ [Bacillus licheniformis DSM 13] | UniRef100_Q65HR5 | Bacillus licheniformis DSM 13 |
| 2947 | BLP04769 hypothetical protein | | | |
| 2948 | lip lipase | Lip [Bacillus licheniformis DSM 13] | UniRef100_Q65HR4 | Bacillus licheniformis DSM 13 |
| 2949 | BLP02801 conserved hypothetical protein | Hypothetical protein [Bacillus licheniformis DSM 13] | UniRef100_Q62T66 | Bacillus licheniformis DSM 13 |
| 2950 | appAA oligopeptide ABC transporter (oligopeptide- | Hypothetical protein [Bacillus licheniformis DSM 13] | UniRef100_Q65HR3 | Bacillus licheniformis DSM 13 |
| | binding protein) | | | |
| 2951 | appBA oligopeptide ABC transporter (permease) | Hypothetical protein [Bacillus licheniformis DSM 13] | UniRef100_Q65HR2 | Bacillus licheniformis DSM 13 |
| 2952 | appCA oligopeptide ABC transporter (permease) | Hypothetical protein [Bacillus licheniformis DSM 13] | UniRef100_Q65HR1 | Bacillus licheniformis DSM 13 |
| 2953 | appDA ABC transporter (ATP-binding protein) | Hypothetical protein [Bacillus licheniformis DSM 13] | UniRef100_Q65HR0 | Bacillus licheniformis DSM 13 |
| 2954 | appFA oligopeptide ABC transporter (ATP-binding | Hypothetical protein [Bacillus licheniformis DSM 13] | UniRef100_Q65HQ9 | Bacillus licheniformis DSM 13 |
| | protein) | | | |
| 2955 | BLP02807 putative multidrug extrusion protein | Hypothetical protein [Bacillus licheniformis DSM 13] | UniRef100_Q65HQ8 | Bacillus licheniformis DSM 13 |
| 2956 | BLP02808 Fibronectin-binding protein, putative | Hypothetical protein [Bacillus licheniformis DSM 13] | UniRef100_Q65HQ7 | Bacillus licheniformis DSM 13 |
| 2957 | BLP04939 hypothetical protein | Hypothetical protein [Bacillus licheniformis DSM 13] | UniRef100_Q65HQ6 | Bacillus licheniformis DSM 13 |
| 2958 | yolD conserved hypothetical protein YolD | YolD [Bacillus licheniformis DSM 13] | UniRef100_Q65HQ5 | Bacillus licheniformis DSM 13 |
| 2959 | uvrX UV-damage repair protein UvrX | UvrX [Bacillus licheniformis DSM 13] | UniRef100_Q65HQ4 | Bacillus licheniformis DSM 13 |
| 2960 | BLP02811 hypothetical protein | | | |
| 2961 | yqzH YqzH | Hypothetical protein yqzH [Bacillus licheniformis DSM 13] | UniRef100_Q65HQ3 | Bacillus licheniformis DSM 13 |
| 2962 | yqjV Sugar transporter superfamily YqjV | YqjV [Bacillus licheniformis DSM 13] | UniRef100_Q65HQ2 | Bacillus licheniformis DSM 13 |
| 2963 | yqjT conserved protein YqjT | YqjT [Bacillus licheniformis DSM 13] | UniRef100_Q65HQ1 | Bacillus licheniformis DSM 13 |
| 2964 | coaA pantothenate kinase | CoaA [Bacillus licheniformis DSM 13] | UniRef100_Q65HQ0 | Bacillus licheniformis DSM 13 |
| 2965 | lacG conserved LacG | Hypothetical protein [Bacillus licheniformis DSM 13] | UniRef100_Q65HP9 | Bacillus licheniformis DSM 13 |
| 2966 | lacF ABC transporter, ATP_GTP-binding site motif A | Hypothetical protein [Bacillus licheniformis DSM 13] | UniRef100_Q65HP8 | Bacillus licheniformis DSM 13 |
| | (P-loop) | | | |
| 2967 | lacA3 LacA3 | Hypothetical protein [Bacillus licheniformis DSM 13] | UniRef100_Q65HP7 | Bacillus licheniformis DSM 13 |
| 2968 | BLP02819 transcriptional regulator, lacI family protein | Hypothetical protein [Bacillus licheniformis DSM 13] | UniRef100_Q65HP6 | Bacillus licheniformis DSM 13 |
| 2969 | BLP02820 hypothetical protein | | | |
| 2970 | BLP02821 conserved hypothetical protein | Hypothetical protein [Bacillus licheniformis DSM 13] | UniRef100_Q65HP5 | Bacillus licheniformis DSM 13 |
| 2971 | ymaC conserved hypothetical protein YmaC | YmaC [Bacillus licheniformis DSM 13] | UniRef100_Q65HP4 | Bacillus licheniformis DSM 13 |
| 2972 | BLP04770 hypothetical protein | | | |
| 2973 | BLP02823 hypothetical protein | | | |
| 2974 | yqjQ Short-chain dehydrogenase_reductase YqjQ | YqjQ [Bacillus licheniformis DSM 13] | UniRef100_Q65HP3 | Bacillus licheniformis DSM 13 |
| 2975 | yqjP conserved protein YqjP | YqjP [Bacillus licheniformis DSM 13] | UniRef100_Q65HP2 | Bacillus licheniformis DSM 13 |
| 2976 | proI pyrroline-5-carboxylate reductase | ProI [Bacillus licheniformis DSM 13] | UniRef100_Q65HP1 | Bacillus licheniformis DSM 13 |
| 2977 | yqjN putative amino acid degradation protein | YqjN [Bacillus licheniformis DSM 13] | UniRef100_Q65HP0 | Bacillus licheniformis DSM 13 |
| 2978 | yqjM NADH:flavin oxidoreductase_NADH oxidase | YqjM [Bacillus licheniformis DSM 13] | UniRef100_Q65HN9 | Bacillus licheniformis DSM 13 |
| 2979 | yqjL YqjL | YqjL [Bacillus licheniformis DSM 13] | UniRef100_Q65HN8 | Bacillus licheniformis DSM 13 |
| 2980 | rpmGAA possible ribosomal protein L33 | Hypothetical protein [Bacillus licheniformis DSM 13] | UniRef100_Q65HN7 | Bacillus licheniformis DSM 13 |
| 2981 | mz RNase Z responsible for the maturation of the 3′ | YqjK [Bacillus licheniformis DSM 13] | UniRef100_Q65HN6 | Bacillus licheniformis DSM 13 |
| | end of tRNA | | | |
| 2982 | zwf glucose-6-phosphate 1-dehydrogenase | Zwf [Bacillus licheniformis DSM 13] | UniRef100_Q65HN5 | Bacillus licheniformis DSM 13 |
| 2983 | BLP02833 conserved hypothetical protein | Hypothetical protein [Bacillus licheniformis DSM 13] | UniRef100_Q65HN4 | Bacillus licheniformis DSM 13 |
| 2984 | BLP02834 conserved hypothetical protein | RocC [Bacillus licheniformis DSM 13] | UniRef100_Q65HN3 | Bacillus licheniformis DSM 13 |
| 2985 | BLP02835 conserved hypothetical protein | Hypothetical protein [Bacillus licheniformis DSM 13] | UniRef100_Q65HN2 | Bacillus licheniformis DSM 13 |
| 2986 | ydhQ transcriptional regulator YdhQ | YdhQ [Bacillus licheniformis DSM 13] | UniRef100_Q65HN1 | Bacillus licheniformis DSM 13 |
| 2987 | ydhP Glycoside hydrolase, family 1 YdhP | YdhP [Bacillus licheniformis DSM 13] | UniRef100_Q65HN0 | Bacillus licheniformis DSM 13 |
| 2988 | ydhO PTS system, cellobiose-specific enzyme IIC, | Putative cellobiose-specific enzyme IIC [Bacillus pumilus] | UniRef100_Q8KP28 | Bacillus pumilus |
| | YdhO | | | |
| 2989 | ydhN Phosphotransferase system PTS, | Phosphotransferase system PTS, lactose/cellobiose-specific | UniRef100_Q62T30 | Bacillus licheniformis DSM 13 |
| | lactose_cellobiose-specific IIA subunit YdhN | IIA subunit [Bacillus licheniformis DSM 13] | | |
| 2990 | ydhM Phosphotransferase system, | YdhM [Bacillus licheniformis DSM 13] | UniRef100_Q65HM6 | Bacillus licheniformis DSM 13 |
| | lactose_cellobiose-specific IIB subunit YdhM | | | |
| 2991 | phoB alkaline phosphatase III | Alkaline phosphatase I [Bacillus licheniformis] | UniRef100_Q9F2A5 | Bacillus licheniformis |
| 2992 | gdh glucose 1-dehydrogenase | Glucose dehydrogenase [Bacillus licheniformis] | UniRef100_Q9F2A6 | Bacillus licheniformis |
| 2993 | yqjI 6-phosphogluconate dehydrogenase, | YqjI [Bacillus licheniformis DSM 13] | UniRef100_Q65HM3 | Bacillus licheniformis DSM 13 |
| | decarboxylating YqjI | | | |
| 2994 | dinB1 UMUC-like DNA-repair protein DinB1 | YqjH [Bacillus licheniformis DSM 13] | UniRef100_Q65HM2 | Bacillus licheniformis DSM 13 |
| 2995 | yqzJ YqzJ | Hypothetical protein yqzJ [Bacillus licheniformis DSM 13] | UniRef100_Q65HM1 | Bacillus licheniformis DSM 13 |
| 2996 | oxaA2 translocase for membrane proteins OxaA2 | YqjG [Bacillus licheniformis DSM 13] | UniRef100_Q65HM0 | Bacillus licheniformis DSM 13 |
| 2997 | yqjE peptidase T YqjE | YqjE [Bacillus licheniformis DSM 13] | UniRef100_Q65HL9 | Bacillus licheniformis DSM 13 |
| 2998 | yqjD Carboxyl transferase YqjD | YqjD [Bacillus licheniformis DSM 13] | UniRef100_Q65HL8 | Bacillus licheniformis DSM 13 |
| 2999 | BLP02851 hypothetical protein | | | |
| 3000 | yqjA conserved membrane protein YqjA | Hypothetical protein yqjA [Bacillus licheniformis DSM 13] | UniRef100_Q65HL7 | Bacillus licheniformis DSM 13 |
| 3001 | artM ABC transporter | YqiZ [Bacillus licheniformis DSM 13] | UniRef100_Q65HL6 | Bacillus licheniformis DSM 13 |
| 3002 | artQ high affinity arginine transport system permease | YqiY [Bacillus licheniformis DSM 13] | UniRef100_Q65HL5 | Bacillus licheniformis DSM 13 |
| | protein | | | |
| 3003 | yqiX Probable amino-acid ABC transporter | Probable amino-acid ABC transporter extracellular binding | UniRef100_P54535 | Bacillus subtilis |
| | extracellular-binding protein YqiX | protein yqiX precursor [Bacillus subtilis] | | |
| 3004 | BLP02857 hypothetical protein | | | |
| 3005 | yqiW YqiW | YqiW [Bacillus licheniformis DSM 13] | UniRef100_Q65HL2 | Bacillus licheniformis DSM 13 |
| 3006 | bmrU multidrug resistance protein | BmrU [Bacillus licheniformis DSM 13] | UniRef100_Q65HL1 | Bacillus licheniformis DSM 13 |
| 3007 | bkdB branched-chain alpha-keto acid dehydrogenase | BkdB [Bacillus licheniformis DSM 13] | UniRef100_Q65HL0 | Bacillus licheniformis DSM 13 |
| | E2 subunit (lipoamide acyltransferase) | | | |
| 3008 | bkdAB branched-chain alpha-keto acid | BkdAB [Bacillus licheniformis DSM 13] | UniRef100_Q65HK9 | Bacillus licheniformis DSM 13 |
| | dehydrogenase E1 subunit (2-oxoisovalerate | | | |
| | dehydrogenase beta subunit) | | | |
| 3009 | bkdAA branched-chain alpha-keto acid | BkdAA [Bacillus licheniformis DSM 13] | UniRef100_Q65HK8 | Bacillus licheniformis DSM 13 |
| | dehydrogenase E1 subunit (2-oxoisovalerate | | | |
| | dehydrogenase alpha subunit) | | | |
| 3010 | bfmBC branched-chain alpha-keto acid | LpdV [Bacillus licheniformis DSM 13] | UniRef100_Q65HK7 | Bacillus licheniformis DSM 13 |
| | dehydrogenase E3 subunit (dihydrolipoamide | | | |
| | dehydrogenase) | | | |
| 3011 | buk branched-chain fatty-acid kinase (butyrate | Buk [Bacillus licheniformis DSM 13] | UniRef100_Q65HK6 | Bacillus licheniformis DSM 13 |
| | kinase) | | | |
| 3012 | bcd leucine dehydrogenase | Leucine dehydrogenase [Bacillus licheniformis] | UniRef100_Q53560 | Bacillus licheniformis |
| 3013 | ptb phosphate butyryltransferase | Ptb [Bacillus licheniformis DSM 13] | UniRef100_Q65HK4 | Bacillus licheniformis DSM 13 |
| 3014 | bkdR transcriptional regulator (sigma-L-dependent) | BkdR [Bacillus licheniformis DSM 13] | UniRef100_Q65HK3 | Bacillus licheniformis DSM 13 |
| 3015 | yqzF conserved protein YqzF | Hypothetical protein yqzF [Bacillus licheniformis DSM 13] | UniRef100_Q65HK2 | Bacillus licheniformis DSM 13 |
| 3016 | yqiK Glycerophosphoryl diester phosphodiesterase | YqiK [Bacillus licheniformis DSM 13] | UniRef100_Q65HK1 | Bacillus licheniformis DSM 13 |
| | YqiK | | | |
| 3017 | yqiI N-acetylmuramoyl-L-alanine amidase autolysin | YqiI [Bacillus licheniformis DSM 13] | UniRef100_Q65HK0 | Bacillus licheniformis DSM 13 |
| | YqiI | | | |
| 3018 | yqiH YqiH | | | |
| 3019 | BLP02873 hypothetical protein | | | |
| 3020 | cysEA serine acetyltransferase | Hypothetical protein [Bacillus licheniformis DSM 13] | UniRef100_Q65HJ8 | Bacillus licheniformis DSM 13 |
| 3021 | BLP04895 conserved hypothetical protein | Hypothetical protein [Bacillus licheniformis DSM 13] | UniRef100_Q62T02 | Bacillus licheniformis DSM 13 |
| 3022 | spo0A two-component response regulator | Spo0A protein [Bacillus subtilis] | UniRef100_Q65HJ7 | Bacillus subtilis |
| 3023 | spoIVB serine peptidase SpoIVB | Serine peptidase of the SA clan [Bacillus licheniformis DSM | UniRef100_Q62T00 | Bacillus licheniformis DSM 13 |
| | | 13] | | |
| 3024 | recN RecN | Hypothetical protein recN [Bacillus licheniformis DSM 13] | UniRef100_Q65HJ5 | Bacillus licheniformis DSM 13 |
| 3025 | ahrC transcriptional regulator | Arginine repressor [Bacillus licheniformis] | UniRef100_O86130 | Bacillus licheniformis |
| 3026 | yqxC putative hemolysin A YqxC | YqxC [Bacillus licheniformis DSM 13] | UniRef100_Q65HJ3 | Bacillus licheniformis DSM 13 |
| 3027 | dxs 1-deoxyxylulose-5-phosphate synthase | Dxs [Bacillus licheniformis DSM 13] | UniRef100_Q65HJ2 | Bacillus licheniformis DSM 13 |
| 3028 | BLP02882 hypothetical protein | | | |
| 3029 | ispAB Polyprenyl synthetase, Polyprenyl synthetase | YqiD [Bacillus licheniformis DSM 13] | UniRef100_Q65HJ1 | Bacillus licheniformis DSM 13 |
| 3030 | xseB Exonuclease VII, small subunit | YqiC [Bacillus licheniformis DSM 13] | UniRef100_Q65HJ0 | Bacillus licheniformis DSM 13 |
| 3031 | xseA Exonuclease VII, large subunit | YqiB [Bacillus licheniformis DSM 13] | UniRef100_Q65HI9 | Bacillus licheniformis DSM 13 |
| 3032 | folD methylenetetrahydrofolate dehydrogenase and | FolD [Bacillus licheniformis DSM 13] | UniRef100_Q65HI8 | Bacillus licheniformis DSM 13 |
| | methenyltetrahydrofolate cyclohydrolase | | | |
| 3033 | nusB NusB | Hypothetical protein nusB [Bacillus licheniformis DSM 13] | UniRef100_Q65HI7 | Bacillus licheniformis DSM 13 |
| 3034 | yqhY conserved protein YqhY | Hypothetical protein yqhY [Bacillus licheniformis DSM 13] | UniRef100_Q65HI6 | Bacillus licheniformis DSM 13 |
| 3035 | accC acetyl-CoA carboxylase subunit (biotin | Acetyl-CoA carboxylase subunit [Bacillus licheniformis DSM | UniRef100_Q62SY9 | Bacillus licheniformis DSM 13 |
| | carboxylase subunit) | 13] | | |
| 3036 | accB acetyl-CoA carboxylase subunit (biotin carboxyl | AccB [Bacillus licheniformis DSM 13] | UniRef100_Q65HI4 | Bacillus licheniformis DSM 13 |
| | carrier subunit) | | | |
| 3037 | spoIIIAH SpoIIIAH | Hypothetical protein spoIIIAH [Bacillus licheniformis DSM 13] | UniRef100_Q65HI3 | Bacillus licheniformis DSM 13 |
| 3038 | spoIIIAG SpoIIIAG | Hypothetical protein spoIIIAG [Bacillus licheniformis DSM 13] | UniRef100_Q65HI2 | Bacillus licheniformis DSM 13 |
| 3039 | spoIIIAF SpoIIIAF | Hypothetical protein spoIIIAF [Bacillus licheniformis DSM 13] | UniRef100_Q65HI1 | Bacillus licheniformis DSM 13 |
| 3040 | spoIIIAE SpoIIIAE | Hypothetical protein spoIIIAE [Bacillus licheniformis DSM 13] | UniRef100_Q65HI0 | Bacillus licheniformis DSM 13 |
| 3041 | spoIIIAD SpoIIIAD | Hypothetical protein spoIIIAD [Bacillus licheniformis DSM 13] | UniRef100_Q65HH9 | Bacillus licheniformis DSM 13 |
| 3042 | spoIIIAC SpoIIIAC | Hypothetical protein spoIIIAC [Bacillus licheniformis DSM 13] | UniRef100_Q65HH8 | Bacillus licheniformis DSM 13 |
| 3043 | spoIIIAB SpoIIIAB | Hypothetical protein spoIIIAB [Bacillus licheniformis DSM 13] | UniRef100_Q65HH7 | Bacillus licheniformis DSM 13 |
| 3044 | spoIIIAA SpoIIIAA | SpoIIIAA [Bacillus licheniformis DSM 13] | UniRef100_Q65HH6 | Bacillus licheniformis DSM 13 |
| 3045 | yqhV conserved protein YqhV | Hypothetical protein yqhV [Bacillus licheniformis DSM 13] | UniRef100_Q65HH5 | Bacillus licheniformis DSM 13 |
| 3046 | BLP02900 hypothetical protein | | | |
| 3047 | efp elongation factor P | Efp [Bacillus licheniformis DSM 13] | UniRef100_Q65HH4 | Bacillus licheniformis DSM 13 |
| 3048 | yqhT Peptidase M24B, X-Pro dipeptidase YqhT | YqhT [Bacillus licheniformis DSM 13] | UniRef100_Q65HH3 | Bacillus licheniformis DSM 13 |
| 3049 | yqhS 3-dehydroquinate dehydratase YqhS | YqhS [Bacillus licheniformis DSM 13] | UniRef100_Q65HH2 | Bacillus licheniformis DSM 13 |
| 3050 | yqhR conserved membrane protein YqhR | Hypothetical protein yqhR [Bacillus licheniformis DSM 13] | UniRef100_Q65HH1 | Bacillus licheniformis DSM 13 |
| 3051 | yqhQ conserved membrane protein YqhQ | Hypothetical protein yqhQ [Bacillus licheniformis DSM 13] | UniRef100_Q65HH0 | Bacillus licheniformis DSM 13 |
| 3052 | yqhP conserved membrane protein YqhP | Hypothetical protein yqhP [Bacillus licheniformis DSM 13] | UniRef100_Q65HG9 | Bacillus licheniformis DSM 13 |
| 3053 | yqhO conserved protein YqhO | YqhO [Bacillus licheniformis DSM 13] | UniRef100_Q65HG8 | Bacillus licheniformis DSM 13 |
| 3054 | BLP02908 hypothetical protein | | | |
| 3055 | mntR transcriptional regulator | MntR [Bacillus licheniformis DSM 13] | UniRef100_Q65HG7 | Bacillus licheniformis DSM 13 |
| 3056 | yqhM putative lipoate protein ligase YqhM | YqhM [Bacillus licheniformis DSM 13] | UniRef100_Q65HG6 | Bacillus licheniformis DSM 13 |
| 3057 | yqhL conserved protein YqhL | YqhL [Bacillus licheniformis DSM 13] | UniRef100_Q65HG5 | Bacillus licheniformis DSM 13 |
| 3058 | opuAC glycine betaine ABC transporter (glycine | OpuAC [Bacillus licheniformis DSM 13] | UniRef100_Q65HG4 | Bacillus licheniformis DSM 13 |
| | betaine-binding protein) | | | |
| 3059 | opuAB glycine betaine ABC transporter (permease) | OpuAB [Bacillus licheniformis DSM 13] | UniRef100_Q65HG3 | Bacillus licheniformis DSM 13 |
| 3060 | opuAA glycine betaine ABC transporter (ATP-binding | OpuAA [Bacillus licheniformis DSM 13] | UniRef100_Q65HG2 | Bacillus licheniformis DSM 13 |
| | protein) | | | |
| 3061 | gcvPB glycine decarboxylase (subunit 2) (glycine | GcvPB [Bacillus licheniformis DSM 13] | UniRef100_Q65HG1 | Bacillus licheniformis DSM 13 |
| | cleavage system protein P) | | | |
| 3062 | gcvPA glycine decarboxylase (subunit 1) (glycine | GcvPA [Bacillus licheniformis DSM 13] | UniRef100_Q65HG0 | Bacillus licheniformis DSM 13 |
| | cleavage system protein P) | | | |
| 3063 | gcvT aminomethyltransferase (glycine cleavage | GcvT [Bacillus licheniformis DSM 13] | UniRef100_Q65HF9 | Bacillus licheniformis DSM 13 |
| | system protein T) | | | |
| 3064 | BLP02918 conserved hypothetical protein | Hypothetical protein [Bacillus licheniformis DSM 13] | UniRef100_Q65HF8 | Bacillus licheniformis DSM 13 |
| 3065 | yqhH DEAD_DEAH box helicase YqhH | YqhH [Bacillus licheniformis DSM 13] | UniRef100_Q65HF7 | Bacillus licheniformis DSM 13 |
| 3066 | yqhG conserved protein YqhG | Hypothetical protein yqhG [Bacillus licheniformis DSM 13] | UniRef100_Q65HF6 | Bacillus licheniformis DSM 13 |
| 3067 | sinI antagonist of SinR | SinI [Bacillus licheniformis DSM 13] | UniRef100_Q65HF5 | Bacillus licheniformis DSM 13 |
| 3068 | sinR transcriptional regulator | SinR [Bacillus licheniformis DSM 13] | UniRef100_Q65HF4 | Bacillus licheniformis DSM 13 |
| 3069 | BLP02923 hypothetical protein | | | |
| 3070 | tasA translocation-dependent antimicrobial spore | TasA [Bacillus licheniformis DSM 13] | UniRef100_Q65HF3 | Bacillus licheniformis DSM 13 |
| | component | | | |
| 3071 | sipW type I signal peptidase | SipW [Bacillus licheniformis DSM 13] | UniRef100_Q65HF2 | Bacillus licheniformis DSM 13 |
| 3072 | yqxM secreted biofilm formation protein YqxM | Hypothetical protein yqxM [Bacillus licheniformis DSM 13] | UniRef100_Q65HF1 | Bacillus licheniformis DSM 13 |
| 3073 | yqzG YqZG | Hypothetical protein yqzG [Bacillus licheniformis DSM 13] | UniRef100_Q65HF0 | Bacillus licheniformis DSM 13 |
| 3074 | yqzE YqzE | Hypothetical protein yqzE [Bacillus licheniformis DSM 13] | UniRef100_Q65HE9 | Bacillus licheniformis DSM 13 |
| 3075 | comGG probably part of the DNA transport machinery | ComGG [Bacillus licheniformis DSM 13] | UniRef100_Q65HE8 | Bacillus licheniformis DSM 13 |
| | ComGG | | | |
| 3076 | comGF probably part of the DNA transport machinery | ComGF [Bacillus licheniformis DSM 13] | UniRef100_Q65HE7 | Bacillus licheniformis DSM 13 |
| | ComGF | | | |
| 3077 | comGE probably part of the DNA transport machinery | Late competence protein ComGE [Bacillus licheniformis] | UniRef100_Q8VQ69 | Bacillus licheniformis |
| | ComGE | | | |
| 3078 | comGD probably part of the DNA transport machinery | Late competence protein ComGD [Bacillus licheniformis] | UniRef100_Q8VQ70 | Bacillus licheniformis |
| | ComGD | | | |
| 3079 | comGC ComGC | ComG operon protein 3 homolog precursor [Bacillus | UniRef100_Q8VQ71 | Bacillus licheniformis |
| | | licheniformis] | | |
| 3080 | comGB probably part of the DNA transport machinery | ComGB [Bacillus licheniformis DSM 13] | UniRef100_Q65HE3 | Bacillus licheniformis DSM 13 |
| | ComGB | | | |
| 3081 | comGA ComGA | Late competence protein ComGA [Bacillus licheniformis] | UniRef100_Q8VQ73 | Bacillus licheniformis |
| 3082 | BLP02936 hypothetical protein | | | |
| 3083 | yqhA putative sulphate transporter YqhA | YqhA [Bacillus licheniformis DSM 13] | UniRef100_Q65HE1 | Bacillus licheniformis DSM 13 |
| 3084 | yqgZ conserved protein YqgZ | Hypothetical protein yqgZ [Bacillus licheniformis DSM 13] | UniRef100_Q65HE0 | Bacillus licheniformis DSM 13 |
| 3085 | yqgY conserved protein YqgY | Hypothetical protein yqgY [Bacillus licheniformis DSM 13] | UniRef100_Q65HD9 | Bacillus licheniformis DSM 13 |
| 3086 | yqgX conserved protein YqgX | YqgX [Bacillus licheniformis DSM 13] | UniRef100_Q65HD8 | Bacillus licheniformis DSM 13 |
| 3087 | BLP02941 hypothetical protein | | | |
| 3088 | yqgW conserved protein YqgW | Hypothetical protein yqgW [Bacillus licheniformis DSM 13] | UniRef100_Q62SU2 | Bacillus licheniformis DSM 13 |
| 3089 | yqgV conserved protein YqgV | Hypothetical protein yqgV [Bacillus licheniformis DSM 13] | UniRef100_Q65HD6 | Bacillus licheniformis DSM 13 |
| 3090 | yqgU conserved protein YqgU | YqgU [Bacillus licheniformis DSM 13] | UniRef100_Q65HD5 | Bacillus licheniformis DSM 13 |
| 3091 | yqgT Peptidase M14, carboxypeptidase A | YqgT [Bacillus licheniformis DSM 13] | UniRef100_Q65HD4 | Bacillus licheniformis DSM 13 |
| 3092 | fhuD ferrichrome ABC transporter (ferrichrome- | FhuD [Bacillus licheniformis DSM 13] | UniRef100_Q65HD3 | Bacillus licheniformis DSM 13 |
| | binding protein) | | | |
| 3093 | BLP02947 hypothetical protein | | | |
| 3094 | yqgS Sulfatase | YqgS [Bacillus licheniformis DSM 13] | UniRef100_Q65HD2 | Bacillus licheniformis DSM 13 |
| 3095 | glcK glucose kinase | GlcK [Bacillus licheniformis DSM 13] | UniRef100_Q65HD1 | Bacillus licheniformis DSM 13 |
| 3096 | yqgQ YqgQ | Hypothetical protein yqgQ [Bacillus licheniformis DSM 13] | UniRef100_Q65HD0 | Bacillus licheniformis DSM 13 |
| 3097 | spoVAFA SpoVAFA | Hypothetical protein spoVAFA [Bacillus licheniformis DSM 13] | UniRef100_Q65HC9 | Bacillus licheniformis DSM 13 |
| 3098 | gluP TPR-like, TPR repeat | YqgP [Bacillus licheniformis DSM 13] | UniRef100_Q65HC8 | Bacillus licheniformis DSM 13 |
| 3099 | yqgO YqgO | Hypothetical protein yqgO [Bacillus licheniformis DSM 13] | UniRef100_Q65HC7 | Bacillus licheniformis DSM 13 |
| 3100 | yqgN putative 5-formyltetrahydrofolate cyclo-ligase | YqgN [Bacillus licheniformis DSM 13] | UniRef100_Q65HC6 | Bacillus licheniformis DSM 13 |
| 3101 | yqgM Glycosyl transferase, Family 4 YqgM | YqgM [Bacillus licheniformis DSM 13] | UniRef100_Q65HC4 | Bacillus licheniformis DSM 13 |
| 3102 | yqgL YqgL | Hypothetical protein yqgL [Bacillus licheniformis DSM 13] | UniRef100_Q65HC3 | Bacillus licheniformis DSM 13 |
| 3103 | yqzD conserved protein YqzD | Homeodomain-like [Bacillus licheniformis DSM 13] | UniRef100_Q62SS7 | Bacillus licheniformis DSM 13 |
| 3104 | yqzC conserved protein YqzC | Hypothetical protein yqzC [Bacillus licheniformis DSM 13] | UniRef100_Q65HC1 | Bacillus licheniformis DSM 13 |
| 3105 | pstBB phosphate ABC transporter (ATP-binding | PstBB [Bacillus licheniformis DSM 13] | UniRef100_Q65HC0 | Bacillus licheniformis DSM 13 |
| | protein) | | | |
| 3106 | pstBA phosphate ABC transporter (ATP-binding | PstBA [Bacillus licheniformis DSM 13] | UniRef100_Q65HB9 | Bacillus licheniformis DSM 13 |
| | protein) | | | |
| 3107 | pstA phosphate ABC transporter (permease) | PstA [Bacillus licheniformis DSM 13] | UniRef100_Q65HB8 | Bacillus licheniformis DSM 13 |
| 3108 | pstC phosphate ABC transporter (permease) | PstC [Bacillus licheniformis DSM 13] | UniRef100_Q65HB7 | Bacillus licheniformis DSM 13 |
| 3109 | pstS phosphate ABC transporter (binding protein) | PstS [Bacillus licheniformis DSM 13] | UniRef100_Q65HB6 | Bacillus licheniformis DSM 13 |
| 3110 | pbpA penicillin-binding protein 2A | PbpA [Bacillus licheniformis DSM 13] | UniRef100_Q65HB5 | Bacillus licheniformis DSM 13 |
| 3111 | yqgE Sugar transporter superfamily | YqgE [Bacillus licheniformis DSM 13] | UniRef100_Q65HB4 | Bacillus licheniformis DSM 13 |
| 3112 | BLP02965 hypothetical protein | | | |
| 3113 | sodA superoxide dismutase | SodA [Bacillus licheniformis DSM 13] | UniRef100_Q65HB3 | Bacillus licheniformis DSM 13 |
| 3114 | yqgC conserved membrane protein YqgC | Hypothetical protein yqgC [Bacillus licheniformis DSM 13] | UniRef100_Q65HB2 | Bacillus licheniformis DSM 13 |
| 3115 | yqgB conserved membrane protein YqgB | YqgB [Bacillus licheniformis DSM 13] | UniRef100_Q65HB1 | Bacillus licheniformis DSM 13 |
| 3116 | yqfZ conserved protein YqfZ | Hypothetical protein yqfZ [Bacillus licheniformis DSM 13] | UniRef100_Q62SR5 | Bacillus licheniformis DSM 13 |
| 3117 | ispG IspG protein | YqfY [Bacillus licheniformis DSM 13] | UniRef100_Q65HA9 | Bacillus licheniformis DSM 13 |
| 3118 | yqfX conserved hypothetical protein YqfX | YqfX [Bacillus licheniformis DSM 13] | UniRef100_Q65HA8 | Bacillus licheniformis DSM 13 |
| 3119 | yqfW putative nucleotidease YqfW | YqfW [Bacillus licheniformis DSM 13] | UniRef100_Q65HA7 | Bacillus licheniformis DSM 13 |
| 3120 | zur transcriptional regulator | Zur [Bacillus licheniformis DSM 13] | UniRef100_Q65HA6 | Bacillus licheniformis DSM 13 |
| 3121 | yceA transcriptional regulator YceA | YceA [Bacillus licheniformis DSM 13] | UniRef100_Q65HA5 | Bacillus licheniformis DSM 13 |
| 3122 | BLP02975 ABC transporter | Hypothetical protein [Bacillus licheniformis DSM 13] | UniRef100_Q65HA4 | Bacillus licheniformis DSM 13 |
| 3123 | BLP02976 conserved hypothetical protein | Hypothetical protein [Bacillus licheniformis DSM 13] | UniRef100_Q65HA3 | Bacillus licheniformis DSM 13 |
| 3124 | yqfU conserved hypothetical protein YqfU | YqfU [Bacillus licheniformis DSM 13] | UniRef100_Q65HA2 | Bacillus licheniformis DSM 13 |
| 3125 | yqfT conserved hypothetical protein YqfT | YqfT [Bacillus licheniformis DSM 13] | UniRef100_Q65HA1 | Bacillus licheniformis DSM 13 |
| 3126 | nfo type IV apurinic_apyrimidinic endonuclease | YqfS [Bacillus licheniformis DSM 13] | UniRef100_Q65HA0 | Bacillus licheniformis DSM 13 |
| 3127 | yqfR DEAD_DEAH box ATP dependent helicase YqfR | YqfR [Bacillus licheniformis DSM 13] | UniRef100_Q65H99 | Bacillus licheniformis DSM 13 |
| 3128 | yqfQ Tubulin YqfQ | YqfQ [Bacillus licheniformis DSM 13] | UniRef100_Q65H98 | Bacillus licheniformis DSM 13 |
| 3129 | ispH isopentenyl diphosphate biosynthesis protein | YqfP [Bacillus licheniformis DSM 13] | UniRef100_Q65H97 | Bacillus licheniformis DSM 13 |
| | IspH | | | |
| 3130 | yqfO conserved hypothetical protein YqfO | YqfO [Bacillus licheniformis DSM 13] | UniRef100_Q65H96 | Bacillus licheniformis DSM 13 |
| 3131 | yqfN conserved hypothetical protein YqfN | YqfN [Bacillus licheniformis DSM 13] | UniRef100_Q65H95 | Bacillus licheniformis DSM 13 |
| 3132 | BLP02986 Endonuclease V | YwqL [Bacillus licheniformis DSM 13] | UniRef100_Q65H93 | Bacillus licheniformis DSM 13 |
| 3133 | BLP04896 conserved hypothetical membrane | YetF protein [Bacillus subtilis] | UniRef100_O31533 | Bacillus subtilis |
| | associated protein | | | |
| 3134 | BLP02987 putative cardiolipin synthetase | Cardiolipin synthetase [Bacillus pseudofirmus] | UniRef100_O66043 | Bacillus pseudofirmus |
| 3135 | BLP02988 conserved hypothetical protein | Hypothetical Membrane Associated Protein [Bacillus cereus] | UniRef100_Q81351 | Bacillus cereus |
| 3136 | BLP02989 conserved hypothetical | Hypothetical protein [Bacillus cereus] | UniRef100_Q72XX0 | Bacillus cereus |
| 3137 | BLP04897 conserved hypothetical protein | Hypothetical protein [Bacillus cereus] | UniRef100_Q815J7 | Bacillus cereus |
| 3138 | BLP02990 Stage V sporulation protein AD homolog | Stage V sporulation protein AE [Oceanobacillus iheyensis] | UniRef100_Q8ERC6 | Oceanobacillus iheyensis |
| 3139 | spoVAD SpoVAD | Stage V sporulation protein AD [Bacillus anthracis] | UniRef100_Q81X67 | Bacillus anthracis |
| 3140 | spoVAC2 Stage V sporulation protein AC homolog | Stage V sporulation protein AC [Bacillus cereus] | UniRef100_Q72XX4 | Bacillus cereus |
| 3141 | BLP02993 conserved hypothetical | Lipoprotein, putative [Bacillus cereus] | UniRef100_Q72XX5 | Bacillus cereus |
| 3142 | BLP04898 conserved hypothetical protein | Hypothetical protein OB1383 [Oceanobacillus iheyensis] | UniRef100_Q8ERC2 | Oceanobacillus iheyensis |
| 3143 | BLP02993 manganese catalase | Mn catalase [Bacillus halodurans] | UniRef100_Q9KDZ2 | Bacillus halodurans |
| 3144 | BLP04824 conserved hypothetical protein | BH2251 protein [Bacillus halodurans] | UniRef100_Q9KAN6 | Bacillus halodurans |
| 3145 | gerKC putative spore germination protein | Spore germination protein XC precursor [Bacillus anthracis] | UniRef100_Q9ZFB3 | Bacillus anthracis |
| 3146 | gerKA partial protein | Spore germination protein XA [Bacillus cereus] | UniRef100_Q736Z7 | Bacillus cereus |
| 3147 | BLP04899 conserved hypotical protein | Sporulation specific N-acetylmuramoyl-L-alanine amidase | UniRef100_Q8CX69 | Oceanobacillus iheyensis |
| | | [Oceanobacillus iheyensis] | | |
| 3148 | BLP02998 hypothetical protein | | | |
| 3149 | BLP02999 putative resolvase | Transposon Tn1546 resolvase [Enterococcus faecium] | UniRef100_Q06237 | Enterococcus faecium |
| 3150 | BLP03000 putative transposase | Transposase for transposon Tn1546 [Enterococcus faecium] | UniRef100_Q06238 | Enterococcus faecium |
| 3151 | BLP03001 conserved hypothetical protein | Hypothetical protein [Bacillus licheniformis DSM 13] | UniRef100_Q65H92 | Bacillus licheniformis DSM 13 |
| 3152 | BLP03002 conserved hypothetical protein longer than | Hypothetical protein [Bacillus licheniformis DSM 13] | UniRef100_Q62SP9 | Bacillus licheniformis DSM 13 |
| | others do SJ1904C07D8 BANe | | | |
| 3153 | BLP03003 conserved hypothetical protein | Hypothetical protein [Bacillus licheniformis DSM 13] | UniRef100_Q65H90 | Bacillus licheniformis DSM 13 |
| 3154 | BLP04900 conserved hypothetical protein | Hypothetical protein ywqJ [Bacillus licheniformis DSM 13] | UniRef100_Q65H89 | Bacillus licheniformis DSM 13 |
| 3155 | BLP03004 conserved hypothetical protein | Hypothetical protein [Bacillus licheniformis DSM 13] | UniRef100_Q65H88 | Bacillus licheniformis DSM 13 |
| 3156 | BLP03005 conserved hypothetical protein | Hypothetical protein [Bacillus licheniformis DSM 13] | UniRef100_Q65H87 | Bacillus licheniformis DSM 13 |
| 3157 | BLP03006 conserved hypothetical protein | Hypothetical protein [Bacillus licheniformis DSM 13] | UniRef100_Q65H86 | Bacillus licheniformis DSM 13 |
| 3158 | ywqJA YwqJA | YwqJ [Bacillus licheniformis DSM 13] | UniRef100_Q65H85 | Bacillus licheniformis DSM 13 |
| 3159 | ywqI YwqI | Hypothetical protein ywqI [Bacillus licheniformis DSM 13] | UniRef100_Q65H84 | Bacillus licheniformis DSM 13 |
| 3160 | ywqH YwqH | Hypothetical protein ywqH [Bacillus licheniformis DSM 13] | UniRef100_Q62SP1 | Bacillus licheniformis DSM 13 |
| 3161 | cccA cytochrome c550 | CccA [Bacillus licheniformis DSM 13] | UniRef100_Q65H82 | Bacillus licheniformis DSM 13 |
| 3162 | BLP03011 hypothetical protein | | | |
| 3163 | sigA RNA polymerase major sigma-43 factor (sigma- | SigA [Bacillus licheniformis DSM 13] | UniRef100_Q65H81 | Bacillus licheniformis DSM 13 |
| | A) | | | |
| 3164 | dnaG DNA primase | DnaG [Bacillus licheniformis DSM 13] | UniRef100_Q65H80 | Bacillus licheniformis DSM 13 |
| 3165 | yqxD conserved protein YqxD | Hypothetical protein yqxD [Bacillus licheniformis DSM 13] | UniRef100_Q65H79 | Bacillus licheniformis DSM 13 |
| 3166 | yqfL putative transcriptional regulator YqfL | YqfL [Bacillus licheniformis DSM 13] | UniRef100_Q65H78 | Bacillus licheniformis DSM 13 |
| 3167 | ccpN putative transcriptional repressor CcpN | YqzB [Bacillus licheniformis DSM 13] | UniRef100_Q65H77 | Bacillus licheniformis DSM 13 |
| 3168 | glyS glycyl-tRNA synthetase (beta subunit) | GlyS [Bacillus licheniformis DSM 13] | UniRef100_Q65H76 | Bacillus licheniformis DSM 13 |
| 3169 | glyQ glycyl-tRNA synthetase (alpha subunit) | GlyQ [Bacillus licheniformis DSM 13] | UniRef100_Q65H75 | Bacillus licheniformis DSM 13 |
| 3170 | recO RecO | Hypothetical protein recO [Bacillus licheniformis DSM 13] | UniRef100_Q65H74 | Bacillus licheniformis DSM 13 |
| 3171 | BLP03021 hypothetical protein | Hypothetical protein [Bacillus licheniformis DSM 13] | UniRef100_Q62SN1 | Bacillus licheniformis DSM 13 |
| 3172 | bex GTP-binding protein | Era [Bacillus licheniformis DSM 13] | UniRef100_Q65H73 | Bacillus licheniformis DSM 13 |
| 3173 | cdd cytidine_deoxycytidine deaminase | Cdd [Bacillus licheniformis DSM 13] | UniRef100_Q65H72 | Bacillus licheniformis DSM 13 |
| 3174 | dgkA diacylglycerol kinase | DgkA [Bacillus licheniformis DSM 13] | UniRef100_Q65H71 | Bacillus licheniformis DSM 13 |
| 3175 | BLP03025 Conserved hypothetical protein | YqfG [Bacillus licheniformis DSM 13] | UniRef100_Q65H70 | Bacillus licheniformis DSM 13 |
| 3176 | BLP03026 HDIG-domain containing protein | YqfF [Bacillus licheniformis DSM 13] | UniRef100_Q65H69 | Bacillus licheniformis DSM 13 |
| 3177 | phoH phosphate starvation-induced protein | PhoH [Bacillus licheniformis DSM 13] | UniRef100_Q65H68 | Bacillus licheniformis DSM 13 |
| 3178 | yqfD Putative stage IV sporulation YqfD | Putative stage IV sporulation YqfD [Bacillus licheniformis | UniRef100_Q65H67 | Bacillus licheniformis DSM 13 |
| | | DSM 13] | | |
| 3179 | yqfC conserved hypothetical protein YqfC | YqfC [Bacillus licheniformis DSM 13] | UniRef100_Q65H66 | Bacillus licheniformis DSM 13 |
| 3180 | yqfB conserved hypothetical protein YqfB | YqfB [Bacillus licheniformis DSM 13] | UniRef100_Q65H65 | Bacillus licheniformis DSM 13 |
| 3181 | yqfA conserved hypothetical protein YqfA | YqfA [Bacillus licheniformis DSM 13] | UniRef100_Q65H64 | Bacillus licheniformis DSM 13 |
| 3182 | yqeZ intermembrane protease YqeZ | YqeZ [Bacillus licheniformis DSM 13] | UniRef100_Q65H63 | Bacillus licheniformis DSM 13 |
| 3183 | yqeY conserved hypothetical protein YqeY | YqeY [Bacillus licheniformis DSM 13] | UniRef100_Q65H62 | Bacillus licheniformis DSM 13 |
| 3184 | rpsU ribosomal protein S21 | RpsU [Bacillus licheniformis DSM 13] | UniRef100_Q65H61 | Bacillus licheniformis DSM 13 |
| 3185 | yqeW Na_Pi cotransporter II-related | Na/Pi cotransporter II-related [Bacillus licheniformis DSM 13] | UniRef100_Q62SL7 | Bacillus licheniformis DSM 13 |
| 3186 | BLP03036 deoxyribose-phosphate aldolase | Hypothetical protein [Bacillus licheniformis DSM 13] | UniRef100_Q65H59 | Bacillus licheniformis DSM 13 |
| 3187 | yqeV conserved hypothetical protein YqeV | YqeV [Bacillus licheniformis DSM 13] | UniRef100_Q65H58 | Bacillus licheniformis DSM 13 |
| 3188 | BLP03038 Conserved hypothetical protein | YqeU [Bacillus licheniformis DSM 13] | UniRef100_Q65H57 | Bacillus licheniformis DSM 13 |
| 3189 | prmA Ribosomal protein L11 methyltransferase | YqeT [Bacillus licheniformis DSM 13] | UniRef100_Q65H56 | Bacillus licheniformis DSM 13 |
| 3190 | dnaJ heat-shock protein | DnaJ [Bacillus licheniformis DSM 13] | UniRef100_Q65H55 | Bacillus licheniformis DSM 13 |
| 3191 | dnaK class I heat-shock protein (molecular | DnaK [Bacillus licheniformis DSM 13] | UniRef100_Q65H54 | Bacillus licheniformis DSM 13 |
| | chaperone) | | | |
| 3192 | grpE heat-shock protein | GrpE [Bacillus licheniformis DSM 13] | UniRef100_Q65H53 | Bacillus licheniformis DSM 13 |
| 3193 | hrcA transcriptional regulator | HrcA [Bacillus licheniformis DSM 13] | UniRef100_Q65H52 | Bacillus licheniformis DSM 13 |
| 3194 | hemN coproporphyrinogen III oxidase | HemN [Bacillus licheniformis DSM 13] | UniRef100_Q65H51 | Bacillus licheniformis DSM 13 |
| 3195 | lepA GTP-binding protein | LepA [Bacillus licheniformis DSM 13] | UniRef100_Q65H50 | Bacillus licheniformis DSM 13 |
| 3196 | yqxA YqxA | Hypothetical protein yqxA [Bacillus licheniformis DSM 13] | UniRef100_Q65H49 | Bacillus licheniformis DSM 13 |
| 3197 | spoIIP Stage II sporulation protein P SpoIIP | SpoIIP [Bacillus licheniformis DSM 13] | UniRef100_Q65H48 | Bacillus licheniformis DSM 13 |
| 3198 | gpr spore protease | Gpr [Bacillus licheniformis DSM 13] | UniRef100_Q65H47 | Bacillus licheniformis DSM 13 |
| 3199 | rpsT ribosomal protein S20 | RpsT [Bacillus licheniformis DSM 13] | UniRef100_Q65H46 | Bacillus licheniformis DSM 13 |
| 3200 | holA DNA polymerase III clamp loader subunit, C- | Hypothetical protein yqeN [Bacillus licheniformis] | UniRef100_Q65H45 | Bacillus licheniformis |
| | terminal | | | |
| 3201 | BLP03051 hypothetical protein | Hypothetical protein [Bacillus licheniformis DSM 13] | UniRef100_Q65H44 | Bacillus licheniformis DSM 13 |
| 3202 | comEC ComEC | Late competence protein ComEC [Bacillus licheniformis] | UniRef100_Q8VQ75 | Bacillus licheniformis |
| 3203 | comEB ComEB | Late competence protein ComEB [Bacillus licheniformis] | UniRef100_Q8VQ76 | Bacillus licheniformis |
| 3204 | comEA ComEA | Late competence protein ComEA [Bacillus licheniformis] | UniRef100_Q8VQ77 | Bacillus licheniformis |
| 3205 | comER ComER | Hypothetical protein comER [Bacillus licheniformis] | UniRef100_Q65H40 | Bacillus licheniformis |
| 3206 | yqeM SAM dependent methyltransferase YqeM | YqeM (SAM (And some other nucleotide) binding motif) | UniRef100_Q65H39 | Bacillus licheniformis DSM 13 |
| | | [Bacillus licheniformis DSM 13] | | |
| 3207 | yqeL lojap-related protein YqeL | YqeL [Bacillus licheniformis DSM 13] | UniRef100_Q65H38 | Bacillus licheniformis DSM 13 |
| 3208 | yqeK Conserved hypothetical protein YqeK | YqeK [Bacillus licheniformis DSM 13] | UniRef100_Q65H37 | Bacillus licheniformis DSM 13 |
| 3209 | nadD nicotinate-nucleotide adenylyltransferase NadD | YqeJ [Bacillus licheniformis DSM 13] | UniRef100_Q65H36 | Bacillus licheniformis DSM 13 |
| 3210 | yqel conserved hypothetical protein YqeI | YqeI [Bacillus licheniformis DSM 13] | UniRef100_Q65H35 | Bacillus licheniformis DSM 13 |
| 3211 | aroD shikimate 5-dehydrogenase | AroD [Bacillus licheniformis DSM 13] | UniRef100_Q65H34 | Bacillus licheniformis DSM 13 |
| 3212 | yqeH essential GTPase | YqeH [Bacillus licheniformis DSM 13] | UniRef100_Q65H33 | Bacillus licheniformis DSM 13 |
| 3213 | yqeG HAD superfamily (subfamily IIIA) phosphatase | YqeG (HAD superfamily (Subfamily IIIA) phosphatase, HAD- | UniRef100_Q65H32 | Bacillus licheniformis DSM 13 |
| | YqeG | superfamily hydrolase, subfamily IIIA) [Bacillus licheniformis | | |
| | | DSM 13] | | |
| 3214 | sda Sda | Hypothetical protein sda [Bacillus licheniformis DSM 13] | UniRef100_Q65H31 | Bacillus licheniformis DSM 13 |
| 3215 | BLP04771 conserved hypothetical protein | | | |
| 3216 | yqeF conserved hypothetical YqeF | Lipolytic enzyme, G-D-S-L [Bacillus licheniformis DSM 13] | UniRef100_Q62SI5 | Bacillus licheniformis DSM 13 |
| 3217 | ydfB Rhodopsin-like protein YdfB | YdfB [Bacillus licheniformis DSM 13] | UniRef100_Q65H29 | Bacillus licheniformis DSM 13 |
| 3218 | yrhF conserved protein YrhF | YrhF [Bacillus licheniformis DSM 13] | UniRef100_Q65H28 | Bacillus licheniformis DSM 13 |
| 3219 | yrhE Formate dehydrogenase, alpha subunit YrhE | YrhE [Bacillus licheniformis DSM 13] | UniRef100_Q65H27 | Bacillus licheniformis DSM 13 |
| 3220 | yrhD conserved protein YrhD | Hypothetical protein yrhD [Bacillus licheniformis DSM 13] | UniRef100_Q65H26 | Bacillus licheniformis DSM 13 |
| 3221 | BLP03070 conserved hypothetical protein | Hypothetical protein [Bacillus licheniformis DSM 13] | UniRef100_Q62SI0 | Bacillus licheniformis DSM 13 |
| 3222 | BLP03071 hypothetical protein | | | |
| 3223 | BLP03072 sigK RNA polymerase sporulation-specific | SpoIIIC [Bacillus licheniformis DSM 13] | UniRef100_Q65H24 | Bacillus licheniformis DSM 13 |
| | sigma factor | | | |
| 3224 | BLP03075 ABC transport protein | ABC transporter, ATP-binding protein; possible subtilin | UniRef100_Q6HGQ9 | Bacillus thuringiensis |
| | | transporter [Bacillus thuringiensis] | | |
| 3225 | BLP04901 conserved hypothetical protein | UPI00003163AD UniRef100 entry | UniRef100_UPI00003163AD | |
| 3226 | BLP04902 hypothetical protein | | | |
| 3227 | BLP03076 hypothetical protein | | | |
| 3228 | BLP03077 SpoIIP homolog protein | Hypothetical protein ORF1 [Bacillus megaterium] | UniRef100_O87702 | Bacillus megaterium |
| 3229 | BLP03078 hypothetical protein | | | |
| 3230 | | | | |
| 3231 | | | | |
| 3232 | BLP03079 spoIIIC truncated SpoIIIC | SpoIIIC [Bacillus licheniformis DSM 13] | UniRef100_Q65H24 | Bacillus licheniformis DSM 13 |
| 3233 | BLP03080 conserved hypothetical protein | Hypothetical protein [Bacillus licheniformis DSM 13] | UniRef100_Q65H23 | Bacillus licheniformis DSM 13 |
| 3234 | BLP03081 GCN5-related N-acetyltransferase | Hypothetical protein [Bacillus licheniformis DSM 13] | UniRef100_Q65H22 | Bacillus licheniformis DSM 13 |
| 3235 | BLP03082 conserved hypothetical protein | Hypothetical protein [Bacillus licheniformis DSM 13] | UniRef100_Q62SH6 | Bacillus licheniformis DSM 13 |
| 3236 | BLP03083 partial SpoIIIC | Hypothetical protein [Bacillus licheniformis DSM 13] | UniRef100_Q65H21 | Bacillus licheniformis DSM 13 |
| 3237 | BLP03085 alanyl-tRNA synthetase | Hypothetical protein [Bacillus licheniformis DSM 13] | UniRef100_Q65H19 | Bacillus licheniformis DSM 13 |
| 3238 | BLP03086 putative alanine racemase | Hypothetical protein [Bacillus licheniformis DSM 13] | UniRef100_Q65H18 | Bacillus licheniformis DSM 13 |
| 3239 | yabJB putative translation initiation inhibitor | Hypothetical protein [Bacillus licheniformis DSM 13] | UniRef100_Q65H17 | Bacillus licheniformis DSM 13 |
| 3240 | ansZA putative Asparaginase_glutaminase | YccC1 [Bacillus licheniformis DSM 13] | UniRef100_Q65H16 | Bacillus licheniformis DSM 13 |
| 3241 | thrCA threonine synthase | Hypothetical protein [Bacillus licheniformis DSM 13] | UniRef100_Q65H14 | Bacillus licheniformis DSM 13 |
| 3242 | yabJA putative Endoribonuclease L-PSP | Hypothetical protein [Bacillus licheniformis DSM 13] | UniRef100_Q65H13 | Bacillus licheniformis DSM 13 |
| 3243 | BLP03091 hypothetical DNA binding protein | DctR [Bacillus licheniformis DSM 13] | UniRef100_Q65H12 | Bacillus licheniformis DSM 13 |
| 3244 | BLP03092 hypothetical protein | | | |
| 3245 | spoIIICA RNA polymerase sporulation-specific sigma | Hypothetical protein [Bacillus licheniformis DSM 13] | UniRef100_Q65H11 | Bacillus licheniformis DSM 13 |
| | factor (sigma-K) (C-terminal half) | | | |
| 3246 | BLP03095 putative Flavoredoxin | Hypothetical protein [Bacillus licheniformis DSM 13] | UniRef100_Q65H10 | Bacillus licheniformis DSM 13 |
| 3247 | bmrR transcriptional regulator | BmrR [Bacillus licheniformis DSM 13] | UniRef100_Q65H09 | Bacillus licheniformis DSM 13 |
| 3248 | BLP03097 hypothetical protein | | | |
| 3249 | BLP03098 putative Hydroxyacylglutathione hydrolase | Hypothetical protein [Bacillus licheniformis DSM 13] | UniRef100_Q65H08 | Bacillus licheniformis DSM 13 |
| 3250 | BLP03099 putatice Sulfide-quinone reductase | Hypothetical protein [Bacillus licheniformis DSM 13] | UniRef100_Q65H07 | Bacillus licheniformis DSM 13 |
| 3251 | BLP03100 two-component response regulator | Hypothetical protein [Bacillus licheniformis DSM 13] | UniRef100_Q65H06 | Bacillus licheniformis DSM 13 |
| 3252 | BLP03101 two-component sensor histidine kinase | Hypothetical protein [Bacillus licheniformis DSM 13] | UniRef100_Q65H05 | Bacillus licheniformis DSM 13 |
| 3253 | ydfQ Cytochrome c heme-binding protein YdfQ | YdfQ [Bacillus licheniformis DSM 13] | UniRef100_Q65H04 | Bacillus licheniformis DSM 13 |
| 3254 | yrkJ conserved membrane protein YrkJ | Hypothetical protein yrkJ [Bacillus licheniformis DSM 13] | UniRef100_Q65H03 | Bacillus licheniformis DSM 13 |
| 3255 | yrkl conserved protein Yrkl | Yrkl [Bacillus licheniformis DSM 13] | UniRef100_Q65H02 | Bacillus licheniformis DSM 13 |
| 3256 | yrkH conserved protein YrkH | YrkH [Bacillus licheniformis DSM 13] | UniRef100_Q65H01 | Bacillus licheniformis DSM 13 |
| 3257 | yrkF YrkF | YrkF [Bacillus licheniformis DSM 13] | UniRef100_Q65H00 | Bacillus licheniformis DSM 13 |
| 3258 | yrkE YrkE | Hypothetical protein yrkE [Bacillus licheniformis DSM 13] | UniRef100_Q65GZ9 | Bacillus licheniformis DSM 13 |
| 3259 | BLP03108 hypothetical protein | | | |
| 3260 | yrkD conserved protein YrkD | Hypothetical protein yrkD [Bacillus licheniformis DSM 13] | UniRef100_Q65GZ8 | Bacillus licheniformis DSM 13 |
| 3261 | BLP03110 hypothetical protein | | | |
| 3262 | BLP03111 SAM dependent methyltransferase | Hypothetical protein (SAM (And some other nucleotide) | UniRef100_Q65GZ7 | Bacillus licheniformis DSM 13 |
| | | binding motif, Generic methyltransferase) [Bacillus | | |
| | | licheniformis DSM 13] | | |
| 3263 | BLP03112 conserved hypothetical protein | Hypothetical protein [Bacillus licheniformis DSM 13] | UniRef100_Q65GZ6 | Bacillus licheniformis DSM 13 |
| 3264 | BLP03113 conserved hypothetical protein | Hypothetical protein [Bacillus licheniformis DSM 13] | UniRef100_Q6SGZ5 | Bacillus licheniformis DSM 13 |
| 3265 | BLP03114 putative transport system permease | Hypothetical protein [Bacillus licheniformis DSM 13] | UniRef100_Q65GZ3 | Bacillus licheniformis DSM 13 |
| | protein | | | |
| 3266 | BLP03116 putative carbohydrate esterase family 6 | Hypothetical protein [Bacillus licheniformis DSM 13] | UniRef100_Q65GZ2 | Bacillus licheniformis DSM 13 |
| | protein | | | |
| 3267 | ytjAA conserved protein YtjAA | Hypothetical protein ytjAA [Bacillus licheniformis DSM 13] | UniRef100_Q65GZ1 | Bacillus licheniformis DSM 13 |
| 3268 | BLP03118 delta-aminolevulinic acid dehydratase | Hypothetical protein [Bacillus licheniformis DSM 13] | UniRef100_Q65GZ0 | Bacillus licheniformis DSM 13 |
| | (porphobilinogen synthase) | | | |
| 3269 | hxlB 6-phospho-3-hexuloisomerase HxlB | HxlB [Bacillus licheniformis DSM 13] | UniRef100_Q65GY9 | Bacillus licheniformis DSM 13 |
| 3270 | hxlA 3-hexulose-6-phosphate synthase HxlA | HxlA [Bacillus licheniformis DSM 13] | UniRef100_Q65GY8 | Bacillus licheniformis DSM 13 |
| 3271 | hxlR DNA-binding protein, transcriptional regulator | Hypothetical protein hxlR [Bacillus licheniformis DSM 13] | UniRef100_Q65GY7 | Bacillus licheniformis DSM 13 |
| | HxlR | | | |
| 3272 | des fatty acid desaturase | Des [Bacillus licheniformis DSM 13] | UniRef100_Q65GY6 | Bacillus licheniformis DSM 13 |
| 3273 | desK, yocF DesK two-component system sensor | YocF [Bacillus licheniformis DSM 13] | UniRef100_Q65GY5 | Bacillus licheniformis DSM 13 |
| | kinase | | | |
| 3274 | desR two-component response regulator responsible | YocG [Bacillus licheniformis DSM 13] | UniRef100_Q65GY4 | Bacillus licheniformis DSM 13 |
| | for cold induction of the des gene | | | |
| 3275 | ycgT FAD-dependent pyridine nucleotide-disulphide | YcgT [Bacillus licheniformis DSM 13] | UniRef100_Q65GY3 | Bacillus licheniformis DSM 13 |
| | oxidoreductase YcgT | | | |
| 3276 | appAB oligopeptide ABC transporter (oligopeptide- | Hypothetical protein [Bacillus licheniformis DSM 13] | UniRef100_Q65GY2 | Bacillus licheniformis DSM 13 |
| | binding protein) | | | |
| 3277 | appBB oligopeptide ABC transporter (permease) | Hypothetical protein [Bacillus licheniformis DSM 13] | UniRef100_Q65GY1 | Bacillus licheniformis DSM 13 |
| 3278 | appCB oligopeptide ABC transporter (permease) | Hypothetical protein [Bacillus licheniformis DSM 13] | UniRef100_Q65GY0 | Bacillus licheniformis DSM 13 |
| 3279 | appDB dipeptide ABC transporter (ATP-binding | Hypothetical protein [Bacillus licheniformis DSM 13] | UniRef100_Q65GX9 | Bacillus licheniformis DSM 13 |
| | protein) | | | |
| 3280 | appFB oligopeptide ABC transporter (ATP-binding | Hypothetical protein [Bacillus licheniformis DSM 13] | UniRef100_Q65GX8 | Bacillus licheniformis DSM 13 |
| | protein) | | | |
| 3281 | ydfL Putative DNA binding protein YdfL | YdfL [Bacillus licheniformis DSM 13] | UniRef100_Q65GX7 | Bacillus licheniformis DSM 13 |
| 3282 | matE Multi antimicrobial extrusion protein MatE | Hypothetical protein [Bacillus licheniformis DSM 13] | UniRef100_Q65GX6 | Bacillus licheniformis DSM 13 |
| 3283 | BLP03133 hypothetical protein | Hypothetical protein [Bacillus licheniformis DSM 13] | UniRef100_Q65GX5 | Bacillus licheniformis DSM 13 |
| 3284 | BLP03134 3-oxoacyl-[acyl-carrier-protein] reductase | Hypothetical protein [Bacillus licheniformis DSM 13] | UniRef100_Q65GX4 | Bacillus licheniformis DSM 13 |
| 3285 | BLP03135 putative phosphoesterase | Hypothetical protein [Bacillus licheniformis DSM 13] | UniRef100_Q65GX3 | Bacillus licheniformis DSM 13 |
| 3286 | BLP03136 Esterase_lipase_thioesterase family | Hypothetical protein [Bacillus licheniformis DSM 13] | UniRef100_Q65GX2 | Bacillus licheniformis DSM 13 |
| | protein | | | |
| 3287 | BLP03137 hypothetical protein | | | |
| 3288 | cypA cytochrome P450-like enzyme | CypA [Bacillus licheniformis DSM 13] | UniRef100_Q65GX1 | Bacillus licheniformis DSM 13 |
| 3289 | ytnM conserved membrane protein YtnM | Hypothetical protein ytnM [Bacillus licheniformis DSM 13] | UniRef100_Q65GX0 | Bacillus licheniformis DSM 13 |
| 3290 | yndA conserved hypothetical protein | YndA [Bacillus licheniformis DSM 13] | UniRef100_Q65GW9 | Bacillus licheniformis DSM 13 |
| 3291 | BLP04772 hypothetical protein | | | |
| 3292 | yvaG putative 3-oxoacyl-acyl-carrier protein | YvaG [Bacillus licheniformis DSM 13] | UniRef100_Q65GW8 | Bacillus licheniformis DSM 13 |
| | reductase YvaG | | | |
| 3293 | sacC Glycoside Hydrolase Family 32 | SacC [Bacillus licheniformis DSM 13] | UniRef100_Q65GW7 | Bacillus licheniformis DSM 13 |
| 3294 | levG phosphotransferase system (PTS) fructose- | LevG (Phosphotransferase system (PTS) fructose-specific | UniRef100_Q65GW6 | Bacillus licheniformis DSM 13 |
| | specific enzyme IID component | enzyme IID component) [Bacillus licheniformis DSM 13] | | |
| 3295 | levF phosphotransferase system (PTS) fructose- | LevF (Phosphotransferase system (PTS) fructose-specific | UniRef100_Q65GW5 | Bacillus licheniformis DSM 13 |
| | specific enzyme IIC component | enzyme IIC component) [Bacillus licheniformis DSM 13] | | |
| 3296 | levE phosphotransferase system (PTS) fructose- | LevE (Phosphotransferase system (PTS) fructose-specific | UniRef100_Q65GW4 | Bacillus licheniformis DSM 13 |
| | specific enzyme IIB component | enzyme IIB component) [Bacillus licheniformis DSM 13] | | |
| 3297 | levD phosphotransferase system (PTS) fructose- | LevD (Phosphotransferase system (PTS) fructose-specific | UniRef100_Q65GW3 | Bacillus licheniformis DSM 13 |
| | specific enzyme IIA component | enzyme IIA component) [Bacillus licheniformis DSM 13] | | |
| 3298 | levR transcriptional regulator (NifA_NtrC family) | LevR [Bacillus licheniformis DSM 13] | UniRef100_Q65GW2 | Bacillus licheniformis DSM 13 |
| 3299 | BLP03148 hypothetical protein | | | |
| 3300 | BLP03149 conserved hypothetical protein | Hypothetical protein [Bacillus licheniformis DSM 13] | UniRef100_Q65GW1 | Bacillus licheniformis DSM 13 |
| 3301 | yrhK YrhK | Hypothetical protein yrhK [Bacillus licheniformis DSM 13] | UniRef100_Q65GW0 | Bacillus licheniformis DSM 13 |
| 3302 | cat chloramphenicol O-acetyltransferase | Hypothetical protein [Bacillus licheniformis DSM 13] | UniRef100_Q65GV9 | Bacillus licheniformis DSM 13 |
| 3303 | BLP04773 hypothetical protein | | | |
| 3304 | adaA methylphosphotriester-DNA alkyltransferase | AdaA [Bacillus licheniformis DSM 13] | UniRef100_Q65GV8 | Bacillus licheniformis DSM 13 |
| | and transcriptional regulator (AraC_XylS family) | | | |
| 3305 | adaB O6-methylguanine-DNA methyltransferase | AdaB [Bacillus licheniformis DSM 13] | UniRef100_Q65GV7 | Bacillus licheniformis DSM 13 |
| 3306 | ytbE Aldo_keto reductase YtbE | YtbE [Bacillus licheniformis DSM 13] | UniRef100_Q65GV6 | Bacillus licheniformis DSM 13 |
| 3307 | ytbD PTS system protein YtbD | YtbD [Bacillus licheniformis DSM 13] | UniRef100_Q65GV5 | Bacillus licheniformis DSM 13 |
| 3308 | ytcD possible transcriptional regulator YtcD | YtcD [Bacillus licheniformis DSM 13] | UniRef100_Q65GV4 | Bacillus licheniformis DSM 13 |
| 3309 | BLP03157 putative serine-type peptidase | Hypothetical protein [Bacillus licheniformis DSM 13] | UniRef100_Q65GV3 | Bacillus licheniformis DSM 13 |
| 3310 | BLP03158 hypothetical protein | | | |
| 3311 | BLP03159 hypothetical protein | | | |
| 3312 | yjjA Putative Uroporphyrinogen III synthase YjjA | YjjA [Bacillus licheniformis DSM 13] | UniRef100_Q65GV2 | Bacillus licheniformis DSM 13 |
| 3313 | BLP03161 conserved hypothetical protein | Hypothetical protein [Bacillus licheniformis DSM 13] | UniRef100_Q65GV1 | Bacillus licheniformis DSM 13 |
| 3314 | BLP03162 Periplasmic iron-binding protein | Hypothetical protein [Bacillus licheniformis DSM 13] | UniRef100_Q65GV0 | Bacillus licheniformis DSM 13 |
| 3315 | yybE transcriptional regulator YbbE | YybE [Bacillus licheniformis DSM 13] | UniRef100_Q65GU9 | Bacillus licheniformis DSM 13 |
| 3316 | yybF Sugar transporter superfamily protein YybF | YybF [Bacillus licheniformis DSM 13] | UniRef100_Q65GU8 | Bacillus licheniformis DSM 13 |
| 3317 | BLP03165 conserved hypothetical protein | Hypothetical protein [Bacillus licheniformis DSM 13] | UniRef100_Q65GU7 | Bacillus licheniformis DSM 13 |
| 3318 | cypE cytochrome P450_NADPH-ferrihemoprotein | YrhJ [Bacillus licheniformis DSM 13] | UniRef100_Q65GU6 | Bacillus licheniformis DSM 13 |
| | reductase | | | |
| 3319 | yrhl transcriptional regulator | YrhI [Bacillus licheniformis DSM 13] | UniRef100_Q65GU5 | Bacillus licheniformis DSM 13 |
| 3320 | wprA cell wall-associated protease | Hypothetical protein [Bacillus licheniformis DSM 13] | UniRef100_Q65GU4 | Bacillus licheniformis DSM 13 |
| 3321 | BLP03169 hypothetical protein | | | |
| 3322 | yrhH putative SAM dependent methyltransferase YrrH | Hypothetical protein (SAM (And some other nucleotide) | UniRef100_Q65GU3 | Bacillus licheniformis DSM 13 |
| | | binding motif) [Bacillus licheniformis DSM 13] | | |
| 3323 | BLP03171 conserved hypothetical protein | | | |
| 3324 | BLP03172 hypothetical protein | | | |
| 3325 | yrzI YrzI | Hypothetical protein yrzI [Bacillus licheniformis DSM 13] | UniRef100_Q62SA2 | Bacillus licheniformis DSM 13 |
| 3326 | yrhC YrhC | YrhC [Bacillus licheniformis DSM 13] | UniRef100_Q65GU2 | Bacillus licheniformis DSM 13 |
| 3327 | yrhB cystathionine gamma-lyase YrhB | YrhB [Bacillus licheniformis DSM 13] | UniRef100_Q65GU1 | Bacillus licheniformis DSM 13 |
| 3328 | yrhA putative cysteine synthase YrhA | YrhA [Bacillus licheniformis DSM 13] | UniRef100_Q65GU0 | Bacillus licheniformis DSM 13 |
| 3329 | mtn methylthioadenosine nucleosidase | Mtn [Bacillus licheniformis DSM 13] | UniRef100_Q65GT9 | Bacillus licheniformis DSM 13 |
| 3330 | yrrT probable S-adenosylmethionine-dependent | YrrT (SAM (And some other nucleotide) binding motif, Generic | UniRef100_Q65GT8 | Bacillus licheniformis DSM 13 |
| | methyltransferase YrrT | methyltransferase) [Bacillus licheniformis DSM 13] | | |
| 3331 | yrzA conserved protein YrzA | Hypothetical protein yrzA [Bacillus licheniformis DSM 13] | UniRef100_Q62S96 | Bacillus licheniformis DSM 13 |
| 3332 | yrrS conserved protein YrrS | YrrS [Bacillus licheniformis DSM 13] | UniRef100_Q65GT6 | Bacillus licheniformis DSM 13 |
| 3333 | BLP03181 hypothetical protein | | | |
| 3334 | yrrR Penicillin-binding protein YrrR | YrrR [Bacillus licheniformis DSM 13] | UniRef100_Q65GT5 | Bacillus licheniformis DSM 13 |
| 3335 | greA transcription elongation factor | GreA [Bacillus licheniformis DSM 13] | UniRef100_Q65GT4 | Bacillus licheniformis DSM 13 |
| 3336 | udk uridine kinase | Udk [Bacillus licheniformis DSM 13] | UniRef100_Q65GT3 | Bacillus licheniformis DSM 13 |
| 3337 | yrrO putative protease YrrO | YrrO [Bacillus licheniformis DSM 13] | UniRef100_Q65GT2 | Bacillus licheniformis DSM 13 |
| 3338 | yrrN Calcium-binding protein YrrN | YrrN [Bacillus licheniformis DSM 13] | UniRef100_Q65GT1 | Bacillus licheniformis DSM 13 |
| 3339 | yrrM SAM-dependent methyltransferase YrrM | YrrM (SAM (And some other nucleotide) binding motif) | UniRef100_Q65GT0 | Bacillus licheniformis DSM 13 |
| | | [Bacillus licheniformis DSM 13] | | |
| 3340 | yrrL conserved protein YrrL | Hypothetical protein yrrL [Bacillus licheniformis DSM 13] | UniRef100_Q65GS9 | Bacillus licheniformis DSM 13 |
| 3341 | yrzB conserved protein YrzB | Hypothetical protein yrzB [Bacillus licheniformis DSM 13] | UniRef100_Q62S87 | Bacillus licheniformis DSM 13 |
| 3342 | yrrK conserved protein YrrK | Hypothetical protein yrrK [Bacillus licheniformis DSM 13] | UniRef100_Q65GS7 | Bacillus licheniformis DSM 13 |
| 3343 | yrzL conserved protein YrzL | Hypothetical protein yrzL [Bacillus licheniformis DSM 13] | UniRef100_Q65GS6 | Bacillus licheniformis DSM 13 |
| 3344 | alaS alanyl-tRNA synthetase | AlaS [Bacillus licheniformis DSM 13] | UniRef100_Q65GS5 | Bacillus licheniformis DSM 13 |
| 3345 | yrrI conserved protein YrrI | Hypothetical protein yrrI [Bacillus licheniformis DSM 13] | UniRef100_Q65GS4 | Bacillus licheniformis DSM 13 |
| 3346 | BLP03195 conserved hypothetical protein | Hypothetical protein [Bacillus licheniformis DSM 13] | UniRef100_Q65GS3 | Bacillus licheniformis DSM 13 |
| 3347 | yrrD Photosynthetic reaction centre, H-chain, | YrrD [Bacillus licheniformis DSM 13] | UniRef100_Q65GS2 | Bacillus licheniformis DSM 13 |
| | cytoplasmic | | | |
| 3348 | yrrC putative exodeoxyribonuclease V alpha subunit | Helicase RecD/TraA [Bacillus licheniformis DSM 13] | UniRef100_Q62S80 | Bacillus licheniformis DSM 13 |
| | YrrC | | | |
| 3349 | yrrB conserved protein YrrB | YrrB [Bacillus licheniformis DSM 13] | UniRef100_Q65GS0 | Bacillus licheniformis DSM 13 |
| 3350 | trmU tRNA (5-methylaminomethyl-2-thiouridylate) | TrmU (TRNA (5-methylaminomethyl-2-thiouridylate) | UniRef100_Q65GR9 | Bacillus licheniformis DSM 13 |
| | methyltransferase | methyltransferase) [Bacillus licheniformis DSM 13] | | |
| 3351 | yrvO Aminotransferase, class V | YrvO [Bacillus licheniformis DSM 13] | UniRef100_Q65GR8 | Bacillus licheniformis DSM 13 |
| 3352 | yrzC negative regulator of riboflavin kinase YrzC | Hypothetical protein yrzC [Bacillus licheniformis DSM 13] | UniRef100_Q65GR7 | Bacillus licheniformis DSM 13 |
| 3353 | yrvN Replication factor C conserved domain | YrvN [Bacillus licheniformis DSM 13] | UniRef100_Q65GR6 | Bacillus licheniformis DSM 13 |
| 3354 | yrvM Molybdenum cofactor biosynthesis | YrvM [Bacillus licheniformis DSM 13] | UniRef100_Q65GR5 | Bacillus licheniformis DSM 13 |
| 3355 | BLP03204 hypothetical protein | | | |
| 3356 | aspS aspartyl-tRNA synthetase | AspS [Bacillus licheniformis DSM 13] | UniRef100_Q65GR4 | Bacillus licheniformis DSM 13 |
| 3357 | hisS histidyl-tRNA synthetase | HisS [Bacillus licheniformis DSM 13] | UniRef100_Q65GR3 | Bacillus licheniformis DSM 13 |
| 3358 | yrzK YrzK | Hypothetical protein yrzK [Bacillus licheniformis DSM 13] | UniRef100_Q62S71 | Bacillus licheniformis DSM 13 |
| 3359 | yrvJ N-acetylmuramoyl-L-alanine amidase YrvJ | YrvJ1 [Bacillus licheniformis DSM 13] | UniRef100_Q65GR1 | Bacillus licheniformis DSM 13 |
| 3360 | yrvI D-tyrosyl-tRNA(Tyr) deacylase | YrvI (D-tyrosyl-tRNA(Tyr) deacylase) [Bacillus licheniformis | UniRef100_Q65GR0 | Bacillus licheniformis DSM 13 |
| | | DSM 13] | | |
| 3361 | relA GTP pyrophosphokinase | RelA [Bacillus licheniformis DSM 13] | UniRef100_Q65GQ9 | Bacillus licheniformis DSM 13 |
| 3362 | BLP03211 hypothetical protein | | | |
| 3363 | apt adenine phosphoribosyltransferase | Apt [Bacillus licheniformis DSM 13] | UniRef100_Q65GQ8 | Bacillus licheniformis DSM 13 |
| 3364 | recJ RecJ exonuclease | YrvE [Bacillus licheniformis DSM 13] | UniRef100_Q65GQ7 | Bacillus licheniformis DSM 13 |
| 3365 | yrvD conserved protein YrvD | Hypothetical protein yrvD [Bacillus licheniformis DSM 13] | UniRef100_Q65GQ6 | Bacillus licheniformis DSM 13 |
| 3366 | secDF protein-export membrane protein SecDF | SecDF [Bacillus licheniformis DSM 13] | UniRef100_Q65GQ5 | Bacillus licheniformis DSM 13 |
| 3367 | yrzD conserved protein YrzD | Hypothetical protein yrzD [Bacillus licheniformis DSM 13] | UniRef100_Q65GQ4 | Bacillus licheniformis DSM 13 |
| 3368 | spoVB SpoVB | SpoVB [Bacillus licheniformis DSM 13] | UniRef100_Q65GQ3 | Bacillus licheniformis DSM 13 |
| 3369 | yrbG conserved membrane protein YrbG | Hypothetical protein yrbG [Bacillus licheniformis DSM 13] | UniRef100_Q65GQ2 | Bacillus licheniformis DSM 13 |
| 3370 | yrzE conserved membrane protein YrzE | Hypothetical protein yrzE [Bacillus licheniformis DSM 13] | UniRef100_Q65GQ1 | Bacillus licheniformis DSM 13 |
| 3371 | BLP04774 hypothetical protein | | | |
| 3372 | yrbF preprotein translocase subunit YrbF | YrbF [Bacillus licheniformis DSM 13] | UniRef100_Q65GQ0 | Bacillus licheniformis DSM 13 |
| 3373 | tgt tRNA-guanine transglycosylase | Tgt [Bacillus licheniformis DSM 13] | UniRef100_Q65GP9 | Bacillus licheniformis DSM 13 |
| 3374 | queA S-adenosylmethionine tRNA ribosyltransferase | QueA [Bacillus licheniformis DSM 13] | UniRef100_Q65GP8 | Bacillus licheniformis DSM 13 |
| 3375 | BLP03223 conserved hypothetical protein | Hypothetical protein [Bacillus licheniformis DSM 13] | UniRef100_Q65GP7 | Bacillus licheniformis DSM 13 |
| 3376 | ruvB Holliday junction DNA helicase | RuvB [Bacillus licheniformis DSM 13] | UniRef100_Q65GP6 | Bacillus licheniformis DSM 13 |
| 3377 | ruvA Holliday junction DNA helicase | RuvA [Bacillus licheniformis DSM 13] | UniRef100_Q65GP5 | Bacillus licheniformis DSM 13 |
| 3378 | bofC BofC | Hypothetical protein bofC [Bacillus licheniformis DSM 13] | UniRef100_Q65GP4 | Bacillus licheniformis DSM 13 |
| 3379 | yrzF probable serine_threonine-protein kinase YrzF | YrzF [Bacillus licheniformis DSM 13] | UniRef100_Q65GP3 | Bacillus licheniformis DSM 13 |
| 3380 | BLP03228 conserved hypothetical protein | Hypothetical protein [Bacillus licheniformis DSM 13] | UniRef100_Q62S51 | Bacillus licheniformis DSM 13 |
| 3381 | sspH small acid-soluble spore protein | SspH [Bacillus licheniformis DSM 13] | UniRef100_Q65GP2 | Bacillus licheniformis DSM 13 |
| 3382 | yjoA conserved hypothetical protein YjoA | YjoA [Bacillus licheniformis DSM 13] | UniRef100_Q65GP1 | Bacillus licheniformis DSM 13 |
| 3383 | ymaC phage-related protein YmaC | Hypothetical protein ymaC [Bacillus licheniformis DSM 13] | UniRef100_Q65GP0 | Bacillus licheniformis DSM 13 |
| 3384 | BLP03232 conserved hypothetical protein | Hypothetical protein [Bacillus licheniformis DSM 13] | UniRef100_Q65GN9 | Bacillus licheniformis DSM 13 |
| 3385 | BLP03233 conserved hypothetical protein | Hypothetical protein [Bacillus licheniformis DSM 13] | UniRef100_Q65GN8 | Bacillus licheniformis DSM 13 |
| 3386 | yrbC conserved protein YrbC | Hypothetical protein yrbC [Bacillus licheniformis DSM 13] | UniRef100_Q65GN7 | Bacillus licheniformis DSM 13 |
| 3387 | coxA spore cortex protein | CoxA [Bacillus licheniformis DSM 13] | UniRef100_Q65GN6 | Bacillus licheniformis DSM 13 |
| 3388 | safA morphogenetic protein associated with SpoVID | SafA [Bacillus licheniformis DSM 13] | UniRef100_Q65GN5 | Bacillus licheniformis DSM 13 |
| 3389 | nadA quinolinate synthetase | NadA [Bacillus licheniformis DSM 13] | UniRef100_Q65GN4 | Bacillus licheniformis DSM 13 |
| 3390 | nadC nicotinate-nucleotide pyrophosphorylase | NadC [Bacillus licheniformis DSM 13] | UniRef100_Q65GN3 | Bacillus licheniformis DSM 13 |
| 3391 | nadB L-aspartate oxidase | NadB [Bacillus licheniformis DSM 13] | UniRef100_Q65GN2 | Bacillus licheniformis DSM 13 |
| 3392 | nifS NifS | Hypothetical protein nifS [Bacillus licheniformis DSM 13] | UniRef100_Q65GN1 | Bacillus licheniformis DSM 13 |
| 3393 | nadR putative regulator of de-novo NAD biosythesis | Winged helix DNA-binding [Bacillus licheniformis DSM 13] | UniRef100_Q62S38 | Bacillus licheniformis DSM 13 |
| | NadR | | | |
| 3394 | pheA prephenate dehydratase | PheA [Bacillus licheniformis DSM 13] | UniRef100_Q65GM9 | Bacillus licheniformis DSM 13 |
| 3395 | pheB chorismate mutase | PheB [Bacillus licheniformis DSM 13] | UniRef100_Q65GM8 | Bacillus licheniformis DSM 13 |
| 3396 | obg GTPase Obg | Obg [Bacillus licheniformis DSM 13] | UniRef100_Q65GM7 | Bacillus licheniformis DSM 13 |
| 3397 | spo0B sporulation initiation phosphotransferase | Spo0B [Bacillus licheniformis DSM 13] | UniRef100_Q65GM6 | Bacillus licheniformis DSM 13 |
| 3398 | rpmA ribosomal protein L27 (BL24) | RpmA [Bacillus licheniformis DSM 13] | UniRef100_Q65GM5 | Bacillus licheniformis DSM 13 |
| 3399 | ysxB hypothetical protein | YsxB [Bacillus licheniformis DSM 13] | UniRef100_Q65GM4 | Bacillus licheniformis DSM 13 |
| 3400 | rplU ribosomal protein L21 (BL20) | RplU [Bacillus licheniformis DSM 13] | UniRef100_Q65GM3 | Bacillus licheniformis DSM 13 |
| 3401 | spoIVFB membrane metalloprotease | SpoIVFB [Bacillus licheniformis DSM 13] | UniRef100_Q65GM2 | Bacillus licheniformis DSM 13 |
| 3402 | spoIVFA SpoIVFA | Hypothetical protein spoIVFA [Bacillus licheniformis DSM 13] | UniRef100_Q65GM1 | Bacillus licheniformis DSM 13 |
| 3403 | yndB conserved protein YndB | Hypothetical protein yndB [Bacillus licheniformis DSM 13] | UniRef100_Q65GM0 | Bacillus licheniformis DSM 13 |
| 3404 | BLP03252 hypothetical DNA binding protein | Hypothetical protein [Bacillus licheniformis DSM 13] | UniRef100_Q65GL9 | Bacillus licheniformis DSM 13 |
| 3405 | minD ATPase activator of MinC | MinD [Bacillus licheniformis DSM 13] | UniRef100_Q65GL8 | Bacillus licheniformis DSM 13 |
| 3406 | minC MinC | MinC [Bacillus licheniformis DSM 13] | UniRef100_Q65GL7 | Bacillus licheniformis DSM 13 |
| 3407 | mreD cell-shape determining protein | MreD [Bacillus licheniformis DSM 13] | UniRef100_Q65GL6 | Bacillus licheniformis DSM 13 |
| 3408 | mreC cell-shape determining protein | MreC [Bacillus licheniformis DSM 13] | UniRef100_Q65GL5 | Bacillus licheniformis DSM 13 |
| 3409 | mreB cell-shape determining protein | MreB [Bacillus licheniformis DSM 13] | UniRef100_Q65GL4 | Bacillus licheniformis DSM 13 |
| 3410 | radC DNA repair protein | RadC [Bacillus licheniformis DSM 13] | UniRef100_Q65GL3 | Bacillus licheniformis DSM 13 |
| 3411 | maf Maf | Hypothetical protein maf [Bacillus licheniformis DSM 13] | UniRef100_Q65GL2 | Bacillus licheniformis DSM 13 |
| 3412 | spoIIB SpoIIB | Endospore development protein SpoIIB [Bacillus | UniRef100_Q65GL1 | Bacillus licheniformis |
| | | licheniformis] | | |
| 3413 | comC DNA-binding protein | Late competence protein ComC [Bacillus licheniformis] | UniRef100_Q62S18 | Bacillus licheniformis |
| 3414 | folC folyl-polyglutamate synthetase | FolC [Bacillus licheniformis DSM 13] | UniRef100_Q65GK9 | Bacillus licheniformis DSM 13 |
| 3415 | BLP03264 conserved hypothetical protein | Hypothetical protein [Bacillus licheniformis DSM 13] | UniRef100_Q65GK7 | Bacillus licheniformis DSM 13 |
| 3416 | ysxE conserved protein YsxE | YsxE [Bacillus licheniformis DSM 13] | UniRef100_Q65GK6 | Bacillus licheniformis DSM 13 |
| 3417 | spoVID SpoVID | Hypothetical protein spoVID [Bacillus licheniformis DSM 13] | UniRef100_Q65GK5 | Bacillus licheniformis DSM 13 |
| 3418 | hemL glutamate-1-semialdehyde 2,1- | HemL [Bacillus licheniformis DSM 13] | UniRef100_Q65GK4 | Bacillus licheniformis DSM 13 |
| | aminotransferase | | | |
| 3419 | hemB delta-aminolevulinic acid dehydratase | HemB [Bacillus licheniformis DSM 13] | UniRef100_Q65GK3 | Bacillus licheniformis DSM 13 |
| | (porphobilinogen synthase) | | | |
| 3420 | hemD uroporphyrinogen III cosynthase | HemD [Bacillus licheniformis DSM 13] | UniRef100_Q65GK2 | Bacillus licheniformis DSM 13 |
| 3421 | hemC porphobilinogen deaminase | HemC [Bacillus licheniformis DSM 13] | UniRef100_Q65GK1 | Bacillus licheniformis DSM 13 |
| | (hydroxymethylbilane synthase) | | | |
| 3422 | hemX membrane-bound protein | HemX [Bacillus licheniformis DSM 13] | UniRef100_Q65GK0 | Bacillus licheniformis DSM 13 |
| 3423 | hemA glutamyl-tRNA reductase | HemA [Bacillus licheniformis DSM 13] | UniRef100_Q65GJ9 | Bacillus licheniformis DSM 13 |
| 3424 | BLP04775 hypothetical protein | | | |
| 3425 | ysxD YsxD | YsxD [Bacillus licheniformis DSM 13] | UniRef100_Q65GJ8 | Bacillus licheniformis DSM 13 |
| 3426 | engB GTP-binding domain, Small GTP-binding protein | YsxC [Bacillus licheniformis DSM 13] | UniRef100_Q65GJ7 | Bacillus licheniformis DSM 13 |
| | domain | | | |
| 3427 | lonA class III heat-shock ATP-dependent Lon | LonA [Bacillus licheniformis DSM 13] | UniRef100_Q65GJ6 | Bacillus licheniformis DSM 13 |
| | protease | | | |
| 3428 | lonB Lon-like ATP-dependent protease | LonB [Bacillus licheniformis DSM 13] | UniRef100_Q65GJ5 | Bacillus licheniformis DSM 13 |
| 3429 | BLP03277 hypothetical protein | | | |
| 3430 | clpX ATP-dependent Clp protease ATP-binding | ClpX [Bacillus licheniformis DSM 13] | UniRef100_Q65GJ4 | Bacillus licheniformis DSM 13 |
| | subunit (class III heat-shock protein) | | | |
| 3431 | BLP03279 hypothetical protein | | | |
| 3432 | tig trigger factor (prolyl isomerase) | Tig [Bacillus licheniformis DSM 13] | UniRef100_Q65GJ3 | Bacillus licheniformis DSM 13 |
| 3433 | ysoA conserved protein YsoA | YsoA [Bacillus licheniformis DSM 13] | UniRef100_Q65GJ2 | Bacillus licheniformis DSM 13 |
| 3434 | BLP03282 hypothetical protein | | | |
| 3435 | leuD 3-isopropylmalate dehydratase (small subunit) | LeuD [Bacillus licheniformis DSM 13] | UniRef100_Q65GJ1 | Bacillus licheniformis DSM 13 |
| 3436 | leuC 3-isopropylmalate dehydratase (large subunit) | LeuC [Bacillus licheniformis DSM 13] | UniRef100_Q65GJ0 | Bacillus licheniformis DSM 13 |
| 3437 | leuB 3-isopropylmalate dehydrogenase | LeuB [Bacillus licheniformis DSM 13] | UniRef100_Q65GI9 | Bacillus licheniformis DSM 13 |
| 3438 | leuA 2-isopropylmalate synthase | LeuA [Bacillus licheniformis DSM 13] | UniRef100_Q65GI8 | Bacillus licheniformis DSM 13 |
| 3439 | ilvC ketol-acid reductoisomerase (acetohydroxy-acid | IlvC [Bacillus licheniformis DSM 13] | UniRef100_Q65GI7 | Bacillus licheniformis DSM 13 |
| | isomeroreductase) | | | |
| 3440 | ilvH acetolactate synthase (acetohydroxy-acid | IlvH [Bacillus licheniformis DSM 13] | UniRef100_Q65GI6 | Bacillus licheniformis DSM 13 |
| | synthase) (small subunit) | | | |
| 3441 | ilvB acetolactate synthase IlvB | IlvB [Bacillus licheniformis DSM 13] | UniRef100_Q65GI5 | Bacillus licheniformis DSM 13 |
| 3442 | BLP03290 hypothetical protein | | | |
| 3443 | BLP03291 putative branched-chain-amino-acid | Hypothetical protein [Bacillus licheniformis DSM 13] | UniRef100_Q65GI4 | Bacillus licheniformis DSM 13 |
| | transaminase | | | |
| 3444 | BLP03292 conserved hypothetical protein | Hypothetical protein [Bacillus licheniformis DSM 13] | UniRef100_Q62RZ1 | Bacillus licheniformis DSM 13 |
| 3445 | BLP03293 putative glutamate dehydrogenase | RocG [Bacillus licheniformis DSM 13] | UniRef100_Q65GI2 | Bacillus licheniformis DSM 13 |
| 3446 | BLP04776 hypothetical protein | | | |
| 3447 | BLP03294 conserved hypothetical protein | Hypothetical protein [Bacillus licheniformis DSM 13] | UniRef100_Q65GI1 | Bacillus licheniformis DSM 13 |
| 3448 | BLP03295 conserved hypothetical protein | Hypothetical protein [Bacillus licheniformis DSM 13] | UniRef100_Q65GI0 | Bacillus licheniformis DSM 13 |
| 3449 | BLP03296 conserved hypothetical phage-like protein | Hypothetical protein [Bacillus licheniformis DSM 13] | UniRef100_Q65GH9 | Bacillus licheniformis DSM 13 |
| 3450 | yqaT Phage terminase, large subunit protein YqaT | YqaT [Bacillus licheniformis DSM 13] | UniRef100_Q65GH8 | Bacillus licheniformis DSM 13 |
| 3451 | BLP03298 conserved hypothetical phage protein | Hypothetical protein [Bacillus licheniformis DSM 13] | UniRef100_Q65GH7 | Bacillus licheniformis DSM 13 |
| 3452 | BLP03299 conserved hypothetical protein | Hypothetical protein [Bacillus licheniformis DSM 13] | UniRef100_Q65GH6 | Bacillus licheniformis DSM 13 |
| 3453 | BLP03300 conserved hypothetical protein | Hypothetical protein [Bacillus licheniformis DSM 13] | UniRef100_Q65GH5 | Bacillus licheniformis DSM 13 |
| 3454 | BLP03301 conserved hypothetical protein | Hypothetical protein [Bacillus licheniformis DSM 13] | UniRef100_Q65GH4 | Bacillus licheniformis DSM 13 |
| 3455 | mtbP modification methylase Bsu | Hypothetical protein [Bacillus licheniformis DSM 13] | UniRef100_Q65GH2 | Bacillus licheniformis DSM 13 |
| 3456 | BLP03304 putative DNA methylase | Hypothetical protein [Bacillus licheniformis DSM 13] | UniRef100_Q65GH1 | Bacillus licheniformis DSM 13 |
| 3457 | BLP03305 hypothetical protein | | | |
| 3458 | BLP03306 conserved hypothetical protein | Hypothetical protein [Bacillus cereus] | UniRef100_Q81BA9 | Bacillus cereus |
| 3459 | BLP03307 putative transposase | Hypothetical protein [Bacillus licheniformis DSM 13] | UniRef100_Q65GG9 | Bacillus licheniformis DSM 13 |
| 3460 | BLP03308 Response regulator aspartate | Response regulator aspartate phosphatase [Bacillus | UniRef100_Q62RX5 | Bacillus licheniformis DSM 13 |
| | phosphatase | licheniformis DSM 13] | | |
| 3461 | BLP03309 hypothetical protein | Hypothetical protein [Bacillus licheniformis DSM 13] | UniRef100_Q65GG7 | Bacillus licheniformis DSM 13 |
| 3462 | BLP03310 phage protein | Hypothetical protein [Bacillus licheniformis DSM 13] | UniRef100_Q65GG6 | Bacillus licheniformis DSM 13 |
| 3463 | BLP03311 conserved hypothetical protein | Hypothetical protein [Bacillus licheniformis DSM 13] | UniRef100_Q62RX2 | Bacillus licheniformis DSM 13 |
| 3464 | ysnB Putative metallophosphoesterase YsnB | YsnB [Bacillus licheniformis DSM 13] | UniRef100_Q65GG4 | Bacillus licheniformis DSM 13 |
| 3465 | ysnA conserved protein YsnA | YsnA [Bacillus licheniformis DSM 13] | UniRef100_Q65GG3 | Bacillus licheniformis DSM 13 |
| 3466 | rph ribonuclease PH | Rph [Bacillus licheniformis DSM 13] | UniRef100_Q65GG2 | Bacillus licheniformis DSM 13 |
| 3467 | gerM spore germination protein GerM | Hypothetical protein gerM [Bacillus licheniformis DSM 13] | UniRef100_Q65GG1 | Bacillus licheniformis DSM 13 |
| 3468 | racE glutamate racemase | RacE [Bacillus licheniformis DSM 13] | UniRef100_Q65GG0 | Bacillus licheniformis DSM 13 |
| 3469 | ysmB probable transcriptional regulator YsmB | YsmB [Bacillus licheniformis DSM 13] | UniRef100_Q65GF9 | Bacillus licheniformis DSM 13 |
| 3470 | gerE transcriptional regulator | GerE [Bacillus licheniformis DSM 13] | UniRef100_Q65GF8 | Bacillus licheniformis DSM 13 |
| 3471 | BLP03319 hypothetical protein | | | |
| 3472 | BLP03320 Short-chain dehydrogenase_reductase | Hypothetical protein [Bacillus licheniformis DSM 13] | UniRef100_Q65GF7 | Bacillus licheniformis DSM 13 |
| | SDR | | | |
| 3473 | ysmA conserved protein YsmA | YsmA [Bacillus licheniformis DSM 13] | UniRef100_Q65GF6 | Bacillus licheniformis DSM 13 |
| 3474 | sdhB succinate dehydrogenase (iron-sulfur protein) | SdhB [Bacillus licheniformis DSM 13] | UniRef100_Q65GF5 | Bacillus licheniformis DSM 13 |
| 3475 | sdhA succinate dehydrogenase (flavoprotein subunit) | SdhA [Bacillus licheniformis DSM 13] | UniRef100_Q65GF4 | Bacillus licheniformis DSM 13 |
| 3476 | sdhC succinate dehydrogenase (cytochrome b558 | SdhC [Bacillus licheniformis DSM 13] | UniRef100_Q65GF3 | Bacillus licheniformis DSM 13 |
| | subunit) | | | |
| 3477 | yslB conserved protein YslB | Hypothetical protein yslB [Bacillus licheniformis DSM 13] | UniRef100_Q65GF2 | Bacillus licheniformis DSM 13 |
| 3478 | lysC aspartokinase II alpha subunit and beta subunit | LysC (Aspartokinase II alpha subunit (Aa 1->408) and beta | UniRef100_Q65GF1 | Bacillus licheniformis DSM 13 |
| | | subunit) [Bacillus licheniformis DSM 13] | | |
| 3479 | uvrC excinuclease ABC (subunit C) | UvrC [Bacillus licheniformis DSM 13] | UniRef100_Q65GF0 | Bacillus licheniformis DSM 13 |
| 3480 | trxA thioredoxin | TrxA [Bacillus licheniformis DSM 13] | UniRef100_Q65GE9 | Bacillus licheniformis DSM 13 |
| 3481 | etfA electron transfer flavoprotein (alpha subunit) | EtfA [Bacillus licheniformis DSM 13] | UniRef100_Q65GE8 | Bacillus licheniformis DSM 13 |
| 3482 | etfB electron transfer flavoprotein (beta subunit) | EtfB [Bacillus licheniformis DSM 13] | UniRef100_Q65GE7 | Bacillus licheniformis DSM 13 |
| 3483 | ysiB Enoyl-CoA hydratase_isomerase YsiB | YsiB [Bacillus licheniformis DSM 13] | UniRef100_Q65GE6 | Bacillus licheniformis DSM 13 |
| 3484 | ysiA probable transcriptional regulator YsiA | YsiA [Bacillus licheniformis DSM 13] | UniRef100_Q65GE5 | Bacillus licheniformis DSM 13 |
| 3485 | lcfA long chain acyl-CoA synthetase | LcfA [Bacillus licheniformis DSM 13] | UniRef100_Q65GE4 | Bacillus licheniformis DSM 13 |
| 3486 | BLP04903 hypothetical protein | | | |
| 3487 | yshE conserved membrane protein YshE | Hypothetical protein yshE [Bacillus licheniformis DSM 13] | UniRef100_Q65GE3 | Bacillus licheniformis DSM 13 |
| 3488 | mutSB DNA mismatch repair protein MutSB | Hypothetical protein mutSB [Bacillus licheniformis DSM 13] | UniRef100_Q65GE2 | Bacillus licheniformis DSM 13 |
| 3489 | yshC putative DNA polymerase YshC | RuvA domain 2-like, DNA polymerase beta, N-terminal-like | UniRef100_Q62RU7 | Bacillus licheniformis DSM 13 |
| | | [Bacillus licheniformis DSM 13] | | |
| 3490 | yshB conserved membrane protein YshB | YshB [Bacillus licheniformis DSM 13] | UniRef100_Q65GE0 | Bacillus licheniformis DSM 13 |
| 3491 | zapA ZapA | YshA [Bacillus licheniformis DSM 13] | UniRef100_Q65GD9 | Bacillus licheniformis DSM 13 |
| 3492 | rnhC ribonuclease HIII | RnhC [Bacillus licheniformis DSM 13] | UniRef100_Q65GD8 | Bacillus licheniformis DSM 13 |
| 3493 | BLP04942 hypothetical protein | | | |
| 3494 | BLP03340 conserved hypothetical protein | Hypothetical protein [Bacillus licheniformis DSM 13] | UniRef100_Q65GD7 | Bacillus licheniformis DSM 13 |
| 3495 | BLP03341 phenylalanyl-tRNA synthetase (beta | Phenylalanyl-tRNA synthetase [Bacillus licheniformis DSM | UniRef100_Q62RU1 | Bacillus licheniformis DSM 13 |
| | subunit) | 13] | | |
| 3496 | BLP04904 hypothetical protein | | | |
| 3497 | BLP03342 conserved hypothetical protein | Hypothetical protein [Bacillus licheniformis DSM 13] | UniRef100_Q65GD6 | Bacillus licheniformis DSM 13 |
| 3498 | BLP03343 ABC transporter, ATP_GTP-binding site | Hypothetical protein [Bacillus licheniformis DSM 13] | UniRef100_Q65GD5 | Bacillus licheniformis DSM 13 |
| | motif A (P-loop) | | | |
| 3499 | BLP03344 hypothetical protein | | | |
| 3500 | BLP03345 conserved hypothetical protein | Hypothetical protein [Bacillus licheniformis DSM 13] | UniRef100_Q65GD4 | Bacillus licheniformis DSM 13 |
| 3501 | pheT phenylalanyl-tRNA synthetase (beta subunit) | PheT [Bacillus licheniformis DSM 13] | UniRef100_Q65GD3 | Bacillus licheniformis DSM 13 |
| 3502 | pheS phenylalanyl-tRNA synthetase (alpha subunit) | PheS [Bacillus licheniformis DSM 13] | UniRef100_Q65GD2 | Bacillus licheniformis DSM 13 |
| 3503 | BLP03348 hypothetical protein | | | |
| 3504 | BLP03349 hypothetical protein | | | |
| 3505 | ysgA putative RNA methylase YsgA | YsgA [Bacillus licheniformis DSM 13] | UniRef100_Q65GD1 | Bacillus licheniformis DSM 13 |
| 3506 | sspI small acid-soluble spore protein | SspI [Bacillus licheniformis DSM 13] | UniRef100_Q6SGD0 | Bacillus licheniformis DSM 13 |
| 3507 | cstA carbon starvation-induced protein | CstA [Bacillus licheniformis DSM 13] | UniRef100_Q65GC9 | Bacillus licheniformis DSM 13 |
| 3508 | BLP03353 conserved hypothetical protein | Hypothetical protein [Bacillus licheniformis DSM 13] | UniRef100_Q65GC8 | Bacillus licheniformis DSM 13 |
| 3509 | BLP03354 hypothetical protein | | | |
| 3510 | abfA Glycoside Hydrolase Family 51 | AbfA [Bacillus licheniformis DSM 13] | UniRef100_Q65GC7 | Bacillus licheniformis DSM 13 |
| 3511 | araQ integral membrane protein | AraQ [Bacillus licheniformis DSM 13] | UniRef100_Q65GC6 | Bacillus licheniformis DSM 13 |
| 3512 | araP integral membrane protein | AraP [Bacillus licheniformis DSM 13] | UniRef100_Q65GC5 | Bacillus licheniformis DSM 13 |
| 3513 | araN sugar-binding protein | AraN [Bacillus licheniformis DSM 13] | UniRef100_Q65GC4 | Bacillus licheniformis DSM 13 |
| 3514 | araM AraM | Hypothetical protein araM [Bacillus licheniformis DSM 13] | UniRef100_Q65GC3 | Bacillus licheniformis DSM 13 |
| 3515 | araD L-ribulose-5-phosphate 4-epimerase | AraD [Bacillus licheniformis DSM 13] | UniRef100_Q65GC2 | Bacillus licheniformis DSM 13 |
| 3516 | araB L-ribulokinase | AraB [Bacillus licheniformis DSM 13] | UniRef100_Q65GC1 | Bacillus licheniformis DSM 13 |
| 3517 | araA L-arabinose isomerase | AraA [Bacillus licheniformis DSM 13] | UniRef100_Q65GC0 | Bacillus licheniformis DSM 13 |
| 3518 | abnA Glycoside Hydrolase Family 43 | Hypothetical protein [Bacillus licheniformis DSM 13] | UniRef100_Q65GB9 | Bacillus licheniformis DSM 13 |
| 3519 | BLP03364 hypothetical protein | | | |
| 3520 | ysdC peptidase M42 family YsdC | YsdC [Bacillus licheniformis DSM 13] | UniRef100_Q65GB8 | Bacillus licheniformis DSM 13 |
| 3521 | ysdB conserved protein YsdB | Hypothetical protein ysdB [Bacillus licheniformis DSM 13] | UniRef100_Q65GB7 | Bacillus licheniformis DSM 13 |
| 3522 | ysdA conserved membrane protein YsdA | Hypothetical protein ysdA [Bacillus licheniformis DSM 13] | UniRef100_Q65GB6 | Bacillus licheniformis DSM 13 |
| 3523 | rplT ribosomal protein L20 | RplT [Bacillus licheniformis DSM 13] | UniRef100_Q65GB5 | Bacillus licheniformis DSM 13 |
| 3524 | rpmI ribosomal protein L35 RpmI | RpmI [Bacillus licheniformis DSM 13] | UniRef100_Q65GB4 | Bacillus licheniformis DSM 13 |
| 3525 | infC initiation factor IF-3 | InfC [Bacillus licheniformis DSM 13] | UniRef100_Q65GB3 | Bacillus licheniformis DSM 13 |
| 3526 | lrgB LrgB-like protein | YsbB [Bacillus licheniformis DSM 13] | UniRef100_Q65GB2 | Bacillus licheniformis DSM 13 |
| 3527 | lrgA LrgA family | YsbA [Bacillus licheniformis DSM 13] | UniRef100_Q65GB1 | Bacillus licheniformis DSM 13 |
| 3528 | BLP03372 phosphodiesterase_alkaline phosphatase D | Hypothetical protein [Bacillus licheniformis DSM 13] | UniRef100_Q65GB0 | Bacillus licheniformis DSM 13 |
| 3529 | lytT two-component response regulator | LytT [Bacillus licheniformis DSM 13] | UniRef100_Q65GA9 | Bacillus licheniformis DSM 13 |
| 3530 | lytS two-component sensor histidine kinase | LytS [Bacillus licheniformis DSM 13] | UniRef100_Q65GA8 | Bacillus licheniformis DSM 13 |
| 3531 | BLP03375 conserved hypothetical protein | Hypothetical protein [Bacillus licheniformis DSM 13] | UniRef100_Q65GA7 | Bacillus licheniformis DSM 13 |
| 3532 | ysaA putative metallopeptidase YsaA | HAD-superfamily hydrolase, subfamily IA, variant 1, Peptidase | UniRef100_Q62RR1 | Bacillus licheniformis DSM 13 |
| | | M, neutral zinc metallopeptidases, zinc-binding site [Bacillus | | |
| | | licheniformis DSM 13] | | |
| 3533 | thrS threonyl-tRNA synthetase | ThrS [Bacillus licheniformis DSM 13] | UniRef100_Q65GA5 | Bacillus licheniformis DSM 13 |
| 3534 | ytxC conserved protein YtxC | Hypothetical protein ytxC [Bacillus licheniformis DSM 13] | UniRef100_Q65GA4 | Bacillus licheniformis DSM 13 |
| 3535 | ytxB conserved membrane protein YtxB | YtxB [Bacillus licheniformis DSM 13] | UniRef100_Q65GA3 | Bacillus licheniformis DSM 13 |
| 3536 | dnaI helicase loader | DnaI [Bacillus licheniformis DSM 13] | UniRef100_Q65GA2 | Bacillus licheniformis DSM 13 |
| 3537 | dnaB membrane attachment protein | DnaB [Bacillus licheniformis DSM 13] | UniRef100_Q65GA1 | Bacillus licheniformis DSM 13 |
| 3538 | ytcG putative transcriptional regulator | Hypothetical protein ytcG [Bacillus licheniformis DSM 13] | UniRef100_Q65GA0 | Bacillus licheniformis DSM 13 |
| 3539 | BLP03383 hypothetical protein | Hypothetical protein [Bacillus licheniformis DSM 13] | UniRef100_Q65G99 | Bacillus licheniformis DSM 13 |
| 3540 | speD S-adenosylmethionine decarboxylase | SpeD [Bacillus licheniformis DSM 13] | UniRef100_Q65G98 | Bacillus licheniformis DSM 13 |
| 3541 | gapB glyceraldehyde-3-phosphate dehydrogenase | GapB [Bacillus licheniformis DSM 13] | UniRef100_Q65G97 | Bacillus licheniformis DSM 13 |
| 3542 | pelB pectate lyase, Polysaccharide Lyase Family 1 | PelB [Bacillus licheniformis DSM 13] | UniRef100_Q65G96 | Bacillus licheniformis DSM 13 |
| 3543 | coaE Dephospho-CoA kinase | YtaG [Bacillus licheniformis DSM 13] | UniRef100_Q65G95 | Bacillus licheniformis DSM 13 |
| 3544 | ytaF conserved membrane protein YtaF | YtaF [Bacillus licheniformis DSM 13] | UniRef100_Q65G94 | Bacillus licheniformis DSM 13 |
| 3545 | mutM formamidopyrimidine-DNA glycosidase | MutM [Bacillus licheniformis DSM 13] | UniRef100_Q65G93 | Bacillus licheniformis DSM 13 |
| 3546 | polA DNA polymerase I | PolA [Bacillus licheniformis DSM 13] | UniRef100_Q65G92 | Bacillus licheniformis DSM 13 |
| 3547 | phoR two-component sensor histidine kinase | PhoR [Bacillus licheniformis DSM 13] | UniRef100_Q65G91 | Bacillus licheniformis DSM 13 |
| 3548 | phoP two-component response regulator | Two-component response regulator [Bacillus licheniformis | UniRef100_Q62RP5 | Bacillus licheniformis DSM 13 |
| | | DSM 13] | | |
| 3549 | BLP03393 hypothetical protein | | | |
| 3550 | mdh malate dehydrogenase | Mdh [Bacillus licheniformis DSM 13] | UniRef100_Q65G89 | Bacillus licheniformis DSM 13 |
| 3551 | icd isocitrate dehydrogenase | Icd [Bacillus licheniformis DSM 13] | UniRef100_Q65G88 | Bacillus licheniformis DSM 13 |
| 3552 | citZ citrate synthase II | CitZ [Bacillus licheniformis DSM 13] | UniRef100_Q65G87 | Bacillus licheniformis DSM 13 |
| 3553 | ytwI conserved membrane protein YtwI | Hypothetical protein ytwI [Bacillus licheniformis DSM 13] | UniRef100_Q65G86 | Bacillus licheniformis DSM 13 |
| 3554 | ytvI conserved membrane protein YtvI | Hypothetical protein ytvI [Bacillus licheniformis DSM 13] | UniRef100_Q65G85 | Bacillus licheniformis DSM 13 |
| 3555 | ytzA conserved membrane protein YtzA | YtzA [Bacillus licheniformis DSM 13] | UniRef100_Q65G84 | Bacillus licheniformis DSM 13 |
| 3556 | pyk pyruvate kinase | Pyruvate kinase [Bacillus licheniformis] | UniRef100_P51181 | Bacillus licheniformis |
| 3557 | pfkA 6-phosphofructokinase | 6-phosphofructokinase [Bacillus licheniformis DSM 13] | UniRef100_Q62RN7 | Bacillus licheniformis DSM 13 |
| 3558 | BLP04778 hypothetical protein | | | |
| 3559 | accA acetyl CoA carboxylase (alpha subunit) | AccA [Bacillus licheniformis DSM 13] | UniRef100_Q65G81 | Bacillus licheniformis DSM 13 |
| 3560 | accD acetyl-CoA carboxylase (beta subunit) | AccD [Bacillus licheniformis DSM 13] | UniRef100_Q65G80 | Bacillus licheniformis DSM 13 |
| 3561 | ytsJ malate dehydrogenase isozyme YtsJ | YtsJ [Bacillus licheniformis DSM 13] | UniRef100_Q65G79 | Bacillus licheniformis DSM 13 |
| 3562 | dnaE DNA polymerase III (alpha subunit) | DnaE [Bacillus licheniformis DSM 13] | UniRef100_Q65G78 | Bacillus licheniformis DSM 13 |
| 3563 | BLP03406 hypothetical protein | Hypothetical protein [Bacillus licheniformis DSM 13] | UniRef100_Q65G77 | Bacillus licheniformis DSM 13 |
| 3564 | ytrI conserved protein YtrI | Hypothetical protein ytrI [Bacillus licheniformis DSM 13] | UniRef100_Q65G76 | Bacillus licheniformis DSM 13 |
| 3565 | BLP03408 hypothetical protein | Hypothetical protein [Bacillus licheniformis DSM 13] | UniRef100_Q65G75 | Bacillus licheniformis DSM 13 |
| 3566 | ytqI YtqI | YtqI [Bacillus licheniformis DSM 13] | UniRef100_Q65G74 | Bacillus licheniformis DSM 13 |
| 3567 | ytpI conserved membrane protein YtpI | Hypothetical protein ytpI [Bacillus licheniformis DSM 13] | UniRef100_Q65G73 | Bacillus licheniformis DSM 13 |
| 3568 | ytoI conserved protein YtoI | YtoI [Bacillus licheniformis DSM 13] | UniRef100_Q65G72 | Bacillus licheniformis DSM 13 |
| 3569 | padR transcriptional regulator | PadR [Bacillus licheniformis DSM 13] | UniRef100_Q65G71 | Bacillus licheniformis DSM 13 |
| 3570 | ytkL conserved protein YtkL | YtkL [Bacillus licheniformis DSM 13] | UniRef100_Q65G70 | Bacillus licheniformis DSM 13 |
| 3571 | ytkK Short-chain dehydrogenase_reductase YtkK | YtkK [Bacillus licheniformis DSM 13] | UniRef100_Q65G69 | Bacillus licheniformis DSM 13 |
| 3572 | BLP03415 hypothetical protein | Hypothetical protein [Bacillus licheniformis DSM 13] | UniRef100_Q62RM3 | Bacillus licheniformis DSM 13 |
| 3573 | argH argininosuccinate lyase | ArgH [Bacillus licheniformis DSM 13] | UniRef100_Q65G68 | Bacillus licheniformis DSM 13 |
| 3574 | argG argininosuccinate synthase | ArgG [Bacillus licheniformis DSM 13] | UniRef100_Q65G67 | Bacillus licheniformis DSM 13 |
| 3575 | moaB molybdopterin precursor biosynthesis protein B | MoaB [Bacillus licheniformis DSM 13] | UniRef100_Q65G66 | Bacillus licheniformis DSM 13 |
| 3576 | ackA Acetate kinase | AckA [Bacillus licheniformis DSM 13] | UniRef100_Q65G65 | Bacillus licheniformis DSM 13 |
| 3577 | BLP03421 hypothetical protein | | | |
| 3578 | ytxK putative RNA methylase YtxK | YtxK (SAM (And some other nucleotide) binding motif) | UniRef100_Q65G64 | Bacillus licheniformis DSM 13 |
| | | [Bacillus licheniformis DSM 13] | | |
| 3579 | tpx thiol peroxidase | Tpx [Bacillus licheniformis DSM 13] | UniRef100_Q65G63 | Bacillus licheniformis DSM 13 |
| 3580 | ytfJ conserved protein YtfJ | Hypothetical protein ytfJ [Bacillus licheniformis DSM 13] | UniRef100_Q65G62 | Bacillus licheniformis DSM 13 |
| 3581 | ytfI conserved protein YtfI | YtfI [Bacillus licheniformis DSM 13] | UniRef100_Q65G61 | Bacillus licheniformis DSM 13 |
| 3582 | yteJ conserved membrane protein YteJ | YteJ [Bacillus licheniformis DSM 13] | UniRef100_Q65G60 | Bacillus licheniformis DSM 13 |
| 3583 | sppA signal peptide peptidase | SppA [Bacillus licheniformis DSM 13] | UniRef100_Q65G59 | Bacillus licheniformis DSM 13 |
| 3584 | ppnK2 ATP-NAD kinase | YtdI [Bacillus licheniformis DSM 13] | UniRef100_Q65G58 | Bacillus licheniformis DSM 13 |
| 3585 | yhbJ conserved protein YhbJ | Hypothetical protein [Bacillus licheniformis DSM 13] | UniRef100_Q65G57 | Bacillus licheniformis DSM 13 |
| 3586 | yubD putative transporter YubD | YubD [Bacillus licheniformis DSM 13] | UniRef100_Q65G56 | Bacillus licheniformis DSM 13 |
| 3587 | BLP03431 hypothetical protein | | | |
| 3588 | yxaD probable transcriptional regulator YxaD | YxaD [Bacillus licheniformis DSM 13] | UniRef100_Q65G55 | Bacillus licheniformis DSM 13 |
| 3589 | ytcI AMP-dependent synthetase and ligase YtcI | YtcI [Bacillus licheniformis DSM 13] | UniRef100_Q65G54 | Bacillus licheniformis DSM 13 |
| 3590 | sspB small acid-soluble spore protein (beta-type | Hypothetical protein [Bacillus licheniformis DSM 13] | UniRef100_Q65G53 | Bacillus licheniformis DSM 13 |
| | SASP) | | | |
| 3591 | thil Thiamine biosynthesis protein | YtbJ [Bacillus licheniformis DSM 13] | UniRef100_Q65G52 | Bacillus licheniformis DSM 13 |
| 3592 | nifZ NifZ | NifZ [Bacillus licheniformis DSM 13] | UniRef100_Q65G51 | Bacillus licheniformis DSM 13 |
| 3593 | BLP04780 hypothetical protein | | | |
| 3594 | braB branched-chain amino acid transporter | BraB [Bacillus licheniformis DSM 13] | UniRef100_Q65G50 | Bacillus licheniformis DSM 13 |
| 3595 | ezrA EzrA | Hypothetical protein ezrA [Bacillus licheniformis DSM 13] | UniRef100_Q65G47 | Bacillus licheniformis DSM 13 |
| 3596 | hisJ histidinol phosphate phosphatase | HisJ [Bacillus licheniformis DSM 13] | UniRef100_Q65G46 | Bacillus licheniformis DSM 13 |
| 3597 | yttP putative transcriptional regulator YttP | YttP [Bacillus licheniformis DSM 13] | UniRef100_Q65G45 | Bacillus licheniformis DSM 13 |
| 3598 | BLP03440 hypothetical protein | | | |
| 3599 | ytsP conserved protein YtsP | Hypothetical protein ytsP [Bacillus licheniformis DSM 13] | UniRef100_Q65G44 | Bacillus licheniformis DSM 13 |
| 3600 | ytrP YtrP | | | |
| 3601 | BLP03443 hypothetical protein | | | |
| 3602 | rpsD ribosomal protein S4 | RpsD [Bacillus licheniformis DSM 13] | UniRef100_Q65G42 | Bacillus licheniformis DSM 13 |
| 3603 | BLP04945 conserved hypothetical | Hypothetical protein [Bacillus licheniformis DSM 13] | UniRef100_Q65G41 | Bacillus licheniformis DSM 13 |
| 3604 | BLP03445 hypothetical protein | Hypothetical protein [Bacillus licheniformis DSM 13] | UniRef100_Q65G40 | Bacillus licheniformis DSM 13 |
| 3605 | BLP03446 hypothetical protein | Hypothetical protein [Bacillus licheniformis DSM 13] | UniRef100_Q65G39 | Bacillus licheniformis DSM 13 |
| 3606 | BLP04781 hypothetical protein | | | |
| 3607 | yddR putative Zn-dependent hydrolases of the beta- | YddR [Bacillus licheniformis DSM 13] | UniRef100_Q65G38 | Bacillus licheniformis DSM 13 |
| | lactamase fold | | | |
| 3608 | lrpA transcriptional regulator (Lrp_AsnC family) | LrpA [Bacillus licheniformis DSM 13] | UniRef100_Q65G37 | Bacillus licheniformis DSM 13 |
| 3609 | BLP03449 hypothetical protein | Hypothetical protein [Bacillus licheniformis DSM 13] | UniRef100_Q65G36 | Bacillus licheniformis DSM 13 |
| 3610 | tyrS tyrosyl-tRNA synthetase | TyrS [Bacillus licheniformis DSM 13] | UniRef100_Q65G35 | Bacillus licheniformis DSM 13 |
| 3611 | BLP03451 hypothetical protein | | | |
| 3612 | acsAA acetyl-CoA synthetase | AcsA [Bacillus licheniformis DSM 13] | UniRef100_Q65G34 | Bacillus licheniformis DSM 13 |
| 3613 | acuA acetoin dehydrogenase | AcuA [Bacillus licheniformis DSM 13] | UniRef100_Q65G33 | Bacillus licheniformis DSM 13 |
| 3614 | acuB acetoin dehydrogenase | AcuB [Bacillus licheniformis DSM 13] | UniRef100_Q65G32 | Bacillus licheniformis DSM 13 |
| 3615 | acuC acetoin dehydrogenase | Acetoin dehydrogenase [Bacillus licheniformis DSM 13] | UniRef100_Q62RI6 | Bacillus licheniformis DSM 13 |
| 3616 | ytxE YtxE | YtxE [Bacillus licheniformis DSM 13] | UniRef100_Q65G30 | Bacillus licheniformis DSM 13 |
| 3617 | ytxD flagellar motor apparatus protein | YtxD [Bacillus licheniformis DSM 13] | UniRef100_Q65G29 | Bacillus licheniformis DSM 13 |
| 3618 | ccpA transcriptional regulator | CcpA [Bacillus licheniformis DSM 13] | UniRef100_Q65G28 | Bacillus licheniformis DSM 13 |
| 3619 | aroA 3-deoxy-D-arabino-heptulosonate 7-phosphate | AroA [Bacillus licheniformis DSM 13] | UniRef100_Q65G27 | Bacillus licheniformis DSM 13 |
| | synthase and chorismate mutase-isozyme 3 | | | |
| 3620 | BLP03460 hypothetical protein | Hypothetical protein [Bacillus licheniformis DSM 13] | UniRef100_Q65G26 | Bacillus licheniformis DSM 13 |
| 3621 | ytxJ YtxJ | Hypothetical protein ytxJ [Bacillus licheniformis DSM 13] | UniRef100_Q65G25 | Bacillus licheniformis DSM 13 |
| 3622 | ytxH conserved protein YtxH | Hypothetical protein ytxH [Bacillus licheniformis DSM 13] | UniRef100_Q65G24 | Bacillus licheniformis DSM 13 |
| 3623 | ytxG conserved protein YtxG | Hypothetical protein ytxG [Bacillus licheniformis DSM 13] | UniRef100_Q65G23 | Bacillus licheniformis DSM 13 |
| 3624 | murC UDP-N-acetyl muramate-alanine ligase | MurC [Bacillus licheniformis DSM 13] | UniRef100_Q65G22 | Bacillus licheniformis DSM 13 |
| 3625 | ytpT YtpT | YtpT [Bacillus licheniformis DSM 13] | UniRef100_Q65G21 | Bacillus licheniformis DSM 13 |
| 3626 | ytpR putative tRNA binding protein YtpR | YtpR [Bacillus licheniformis DSM 13] | UniRef100_Q65G20 | Bacillus licheniformis DSM 13 |
| 3627 | ytpQ conserved protein YtpQ | Hypothetical protein ytpQ [Bacillus licheniformis DSM 13] | UniRef100_Q65G19 | Bacillus licheniformis DSM 13 |
| 3628 | ytpP putative thioredoxin YtpP | YtpP [Bacillus licheniformis DSM 13] | UniRef100_Q65G18 | Bacillus licheniformis DSM 13 |
| 3629 | ytoQ Nucleoside 2-deoxyribosyltransferase YtoQ | YtoQ [Bacillus licheniformis DSM 13] | UniRef100_Q65G17 | Bacillus licheniformis DSM 13 |
| 3630 | ytoP putative endo-1,4-glucanase YtoP | YtoP [Bacillus licheniformis DSM 13] | UniRef100_Q65G16 | Bacillus licheniformis DSM 13 |
| 3631 | ytzB conserved protein YtzB | Hypothetical protein ytzB [Bacillus licheniformis DSM 13] | UniRef100_Q65G15 | Bacillus licheniformis DSM 13 |
| 3632 | malS malate dehydrogenase (decarboxylating) | MalS [Bacillus licheniformis DSM 13] | UniRef100_Q65G14 | Bacillus licheniformis DSM 13 |
| 3633 | ytnP Beta-lactamase-like protein YtnP | YtnP [Bacillus licheniformis DSM 13] | UniRef100_Q65G13 | Bacillus licheniformis DSM 13 |
| 3634 | ytmQ putative methyltransferase YtmQ | Hypothetical protein ytmQ [Bacillus licheniformis DSM 13] | UniRef100_Q65G12 | Bacillus licheniformis DSM 13 |
| 3635 | ytzH YtzH | Hypothetical protein ytzH [Bacillus licheniformis DSM 13] | UniRef100_Q65G11 | Bacillus licheniformis DSM 13 |
| 3636 | ytmP YtmP | Protein kinase-like [Bacillus licheniformis DSM 13] | UniRef100_Q62RG5 | Bacillus licheniformis DSM 13 |
| 3637 | amyX putative pullulanase, Glycoside Hydrolase | AmyX [Bacillus licheniformis DSM 13] | UniRef100_Q65G09 | Bacillus licheniformis DSM 13 |
| | Family 13, AmyX | | | |
| 3638 | ytlR conserved protein YtlR | Hypothetical protein ytlR [Bacillus licheniformis DSM 13] | UniRef100_Q65G08 | Bacillus licheniformis DSM 13 |
| 3639 | ytlQ conserved protein YtlQ | Hypothetical protein ytlQ [Bacillus licheniformis DSM 13] | UniRef100_Q65G07 | Bacillus licheniformis DSM 13 |
| 3640 | ytlP 2′_5′ RNA ligase YtlP | YtlP [Bacillus licheniformis DSM 13] | UniRef100_Q65G06 | Bacillus licheniformis DSM 13 |
| 3641 | ytkP cysteine synthase | YtkP [Bacillus licheniformis DSM 13] | UniRef100_Q65G05 | Bacillus licheniformis DSM 13 |
| 3642 | BLP03483 conserved hypothetical protein | Hypothetical protein [Bacillus licheniformis DSM 13] | UniRef100_Q65G04 | Bacillus licheniformis DSM 13 |
| 3643 | yncE YncE | Hypothetical protein yncE [Bacillus licheniformis DSM 13] | UniRef100_Q65G03 | Bacillus licheniformis DSM 13 |
| 3644 | ytjP putative peptidase YtjP | YtjP [Bacillus licheniformis DSM 13] | UniRef100_Q65G02 | Bacillus licheniformis DSM 13 |
| 3645 | pbuO Xanthine_uracil_vitamin C permease family | Xanthine/uracil/vitamin C permease family [Bacillus | UniRef100_Q62RF8 | Bacillus licheniformis DSM 13 |
| | | licheniformis DSM 13] | | |
| 3646 | BLP04905 putative transcriptional regulator | YtzE [Bacillus licheniformis DSM 13] | UniRef100_Q65G00 | Bacillus licheniformis DSM 13 |
| 3647 | ytzF putative Pseudouridine synthase YtzF | Hypothetical protein [Bacillus licheniformis DSM 13] | UniRef100_Q65FZ9 | Bacillus licheniformis DSM 13 |
| 3648 | ytgP possible polysaccharide transporter YtgP | YtgP [Bacillus licheniformis DSM 13] | UniRef100_Q65FZ8 | Bacillus licheniformis DSM 13 |
| 3649 | ytfP conserved protein YtfP | YtfP [Bacillus licheniformis DSM 13] | UniRef100_Q65FZ7 | Bacillus licheniformis DSM 13 |
| 3650 | opuD glycine betaine transporter | OpuD [Bacillus licheniformis DSM 13] | UniRef100_Q65FZ6 | Bacillus licheniformis DSM 13 |
| 3651 | cse60 conserved hypothetical protein | YteV [Bacillus licheniformis DSM 13] | UniRef100_Q65FZ5 | Bacillus licheniformis DSM 13 |
| 3652 | ytwF conserved protein YtwF | Hypothetical protein [Bacillus licheniformis DSM 13] | UniRef100_Q65FZ4 | Bacillus licheniformis DSM 13 |
| 3653 | BLP03493 hypothetical protein | | | |
| 3654 | rapC response regulator aspartate phosphatase | RapC [Bacillus licheniformis DSM 13] | UniRef100_Q65FZ3 | Bacillus licheniformis DSM 13 |
| 3655 | BLP03495 hypothetical protein | | | |
| 3656 | BLP03496 conserved hypothetical protein | Hypothetical protein [Bacillus licheniformis DSM 13] | UniRef100_Q65FZ2 | Bacillus licheniformis DSM 13 |
| 3657 | yteU conserved membrane protein YteU | Hypothetical protein yteU [Bacillus licheniformis DSM 13] | UniRef100_Q65FZ1 | Bacillus licheniformis DSM 13 |
| 3658 | yteT putative oxidoreductase YteT | YteT [Bacillus licheniformis DSM 13] | UniRef100_Q65FZ0 | Bacillus licheniformis DSM 13 |
| 3659 | yteS conserved protein YteS | YteS [Bacillus licheniformis DSM 13] | UniRef100_Q65FY9 | Bacillus licheniformis DSM 13 |
| 3660 | yteR conserved protein YteR | YteR [Bacillus licheniformis DSM 13] | UniRef100_Q65FY8 | Bacillus licheniformis DSM 13 |
| 3661 | BLP03501 putative transmembrane lipoprotein | Hypothetical protein [Bacillus licheniformis DSM 13] | UniRef100_Q65FY7 | Bacillus licheniformis DSM 13 |
| 3662 | ytdP putative transcriptional regulator YtdP | YtdP [Bacillus licheniformis DSM 13] | UniRef100_Q65FY6 | Bacillus licheniformis DSM 13 |
| 3663 | ytcQ putative multiple sugar transport system | YtcQ [Bacillus licheniformis DSM 13] | UniRef100_Q65FY5 | Bacillus licheniformis DSM 13 |
| | substrate-binding protein YtcQ | | | |
| 3664 | ytcP putative multiple sugar transport system | Binding-protein-dependent transport systems inner | UniRef100_Q62RE2 | Bacillus licheniformis DSM 13 |
| | permease protein YtcP | membrane component [Bacillus licheniformis DSM 13] | | |
| 3665 | ytbQ YtbQ | Hypothetical protein YtbQ [Bacillus licheniformis DSM 13] | UniRef100_Q65FY3 | Bacillus licheniformis DSM 13 |
| 3666 | ytaP putative endopeptidase YtaP | YtaP [Bacillus licheniformis DSM 13] | UniRef100_Q65FY2 | Bacillus licheniformis DSM 13 |
| 3667 | yecA probable amino acid permease YecA | Hypothetical protein [Bacillus licheniformis DSM 13] | UniRef100_Q65FY1 | Bacillus licheniformis DSM 13 |
| 3668 | ywqM probable transcriptional regulator YwqM | YwqM [Bacillus licheniformis DSM 13] | UniRef100_Q65FY0 | Bacillus licheniformis DSM 13 |
| 3669 | yycE YycE | Glyoxalase/Bleomycin resistance protein/dioxygenase domain | UniRef100_Q62RD7 | Bacillus licheniformis DSM 13 |
| | | [Bacillus licheniformis DSM 13] | | |
| 3670 | BLP03510 hypothetical protein | | | |
| 3671 | leuS leucyl-tRNA synthetase | LeuS [Bacillus licheniformis DSM 13] | UniRef100_Q65FX8 | Bacillus licheniformis DSM 13 |
| 3672 | ytvB YtvB | YtvB [Bacillus licheniformis DSM 13] | UniRef100_Q65FX7 | Bacillus licheniformis DSM 13 |
| 3673 | BLP03513 hypothetical protein | | | |
| 3674 | yttB Major facilitator superfamily YttB | YttB [Bacillus licheniformis DSM 13] | UniRef100_Q65FX6 | Bacillus licheniformis DSM 13 |
| 3675 | BLP03515 putative lipoprotein | Hypothetical protein [Bacillus licheniformis DSM 13] | UniRef100_Q65FX5 | Bacillus licheniformis DSM 13 |
| 3676 | yttA YttA | Hypothetical protein yttA [Bacillus licheniformis DSM 13] | UniRef100_Q65FX4 | Bacillus licheniformis DSM 13 |
| 3677 | ytrF possible acetoin transport system substrate | Hypothetical protein ytrF [Bacillus licheniformis DSM 13] | UniRef100_Q65FX3 | Bacillus licheniformis DSM 13 |
| | binding protein YtrF | | | |
| 3678 | ytrE ABC transporter YtrE | YtrE [Bacillus licheniformis DSM 13] | UniRef100_Q65FX2 | Bacillus licheniformis DSM 13 |
| 3679 | ytrC putative permease YtrC | Hypothetical protein ytrC [Bacillus licheniformis DSM 13] | UniRef100_Q65FX1 | Bacillus licheniformis DSM 13 |
| 3680 | ytrB ABC transporter YtrB | YtrB [Bacillus licheniformis DSM 13] | UniRef100_Q65FX0 | Bacillus licheniformis DSM 13 |
| 3681 | ytrA transcriptional regulator YtrA | YtrA [Bacillus licheniformis DSM 13] | UniRef100_Q65FW9 | Bacillus licheniformis DSM 13 |
| 3682 | BLP03522 hypothetical protein | | | |
| 3683 | ytzC conserved protein YtzC | Hypothetical protein ytzC [Bacillus licheniformis DSM 13] | UniRef100_Q65FW8 | Bacillus licheniformis DSM 13 |
| 3684 | ytqA Conserved hypothetical protein YtqA | Hypothetical protein ytqA [Bacillus licheniformis DSM 13] | UniRef100_Q65FW7 | Bacillus licheniformis DSM 13 |
| 3685 | ytqB conserved protein YtqB | YtqB [Bacillus licheniformis DSM 13] | UniRef100_Q65FW6 | Bacillus licheniformis DSM 13 |
| 3686 | gltP proton_glutamate symport protein | GltP [Bacillus licheniformis DSM 13] | UniRef100_Q65FW5 | Bacillus licheniformis DSM 13 |
| 3687 | ytpB conserved protein YtpB | Hypothetical protein ytpB [Bacillus licheniformis DSM 13] | UniRef100_Q65FW4 | Bacillus licheniformis DSM 13 |
| 3688 | ytpA Probable lysophospholipase YtpA | YtpA [Bacillus licheniformis DSM 13] | UniRef100_Q65FW3 | Bacillus licheniformis DSM 13 |
| 3689 | ytoA conserved protein YtoA | YtoA [Bacillus licheniformis DSM 13] | UniRef100_Q65FW2 | Bacillus licheniformis DSM 13 |
| 3690 | BLP04782 hypothetical protein | | | |
| 3691 | BLP03530 Ribosomal protein S2 | Ribosomal protein S2 [Bacillus licheniformis DSM 13] | UniRef100_Q62RB9 | Bacillus licheniformis DSM 13 |
| 3692 | BLP03531 putative sugar transferase, Glycosyl | Hypothetical protein [Bacillus licheniformis DSM 13] | UniRef100_Q65FW0 | Bacillus licheniformis DSM 13 |
| | Transferase Family 4 | | | |
| 3693 | asnB asparagine synthetase | AsnB [Bacillus licheniformis DSM 13] | UniRef100_Q65FV9 | Bacillus licheniformis DSM 13 |
| 3694 | BLP03533 hypothetical protein | | | |
| 3695 | metK S-adenosylmethionine synthetase | MetK [Bacillus licheniformis DSM 13] | UniRef100_Q65FV8 | Bacillus licheniformis DSM 13 |
| 3696 | pckA phosphoenolpyruvate carboxykinase | PckA [Bacillus licheniformis DSM 13] | UniRef100_Q65FV7 | Bacillus licheniformis DSM 13 |
| 3697 | dctP C4-dicarboxylate transport protein | Hypothetical protein [Bacillus licheniformis DSM 13] | UniRef100_Q65FV6 | Bacillus licheniformis DSM 13 |
| 3698 | BLP03537 hypothetical protein | YtmB [Bacillus licheniformis DSM 13] | UniRef100_Q65FV5 | Bacillus licheniformis DSM 13 |
| 3699 | BLP03538 Peptidase S9, serine active site | YtmA [Bacillus licheniformis DSM 13] | UniRef100_Q65FV4 | Bacillus licheniformis DSM 13 |
| 3700 | ytlA putative sulfonate transport system substrate- | YtlA [Bacillus licheniformis DSM 13] | UniRef100_Q65FV3 | Bacillus licheniformis DSM 13 |
| | binding protein YtlA | | | |
| 3701 | ytlC putative sulfonate transport system ATP-binding | ytlC [Bacillus licheniformis DSM 13] | UniRef100_Q65FV2 | Bacillus licheniformis DSM 13 |
| | protein YtlC | | | |
| 3702 | ytlD putative sulfonate transport system permease | ytlD [Bacillus licheniformis DSM 13] | UniRef100_Q65FV1 | Bacillus licheniformis DSM 13 |
| | protein YtlD | | | |
| 3703 | ytkD putative hydrolase YtkD | YtkD [Bacillus licheniformis DSM 13] | UniRef100_Q65FV0 | Bacillus licheniformis DSM 13 |
| 3704 | BLP03543 putative hydrolase | Hypothetical Glycoside hydrolase, family 1 [Bacillus | UniRef100_Q62RA7 | Bacillus licheniformis DSM 13 |
| | | licheniformis DSM 13] | | |
| 3705 | ytkC conserved membrane protein YtkC | YtkC [Bacillus licheniformis DSM 13] | UniRef100_Q65FU8 | Bacillus licheniformis DSM 13 |
| 3706 | dps DNA-protecting protein | Dps [Bacillus licheniformis DSM 13] | UniRef100_Q65FU7 | Bacillus licheniformis DSM 13 |
| 3707 | BLP03546 hypothetical protein | | | |
| 3708 | ytkA conserved protein YtkA | Hypothetical protein ytkA [Bacillus licheniformis DSM 13] | UniRef100_Q65FU6 | Bacillus licheniformis DSM 13 |
| 3709 | BLP04783 hypothetical protein | | | |
| 3710 | luxS autoinducer-2 production protein | LuxS [Bacillus licheniformis DSM 13] | UniRef100_Q65FU5 | Bacillus licheniformis DSM 13 |
| 3711 | ytjA conserved protein YtjA | Hypothetical protein ytjA [Bacillus licheniformis DSM 13] | UniRef100_Q65FU4 | Bacillus licheniformis DSM 13 |
| 3712 | ytiB putative Carbonic anhydrase | YtiB [Bacillus licheniformis DSM 13] | UniRef100_Q65FU3 | Bacillus licheniformis DSM 13 |
| 3713 | BLP03551 Cobalamin synthesis protein_P47K | Hypothetical protein [Bacillus licheniformis DSM 13] | UniRef100_Q65FU2 | Bacillus licheniformis DSM 13 |
| 3714 | BLP03552 Periplasmic solute binding protein | YcdH [Bacillus licheniformis DSM 13] | UniRef100_Q65FU1 | Bacillus licheniformis DSM 13 |
| 3715 | rpmE2 Ribosomal protein L31 | YtiA [Bacillus licheniformis DSM 13] | UniRef100_Q65FU0 | Bacillus licheniformis DSM 13 |
| 3716 | BLP03554 hypothetical protein | | | |
| 3717 | ythA Cytochrome bd ubiquinol oxidase, subunit I | YthA [Bacillus licheniformis DSM 13] | UniRef100_Q65FT9 | Bacillus licheniformis DSM 13 |
| 3718 | ythB conserved hypothetical protein YthB | YthB [Bacillus licheniformis DSM 13] | UniRef100_Q65FT8 | Bacillus licheniformis DSM 13 |
| 3719 | BLP03557 hypothetical protein | Hypothetical protein [Bacillus licheniformis DSM 13] | UniRef100_Q62R95 | Bacillus licheniformis DSM 13 |
| 3720 | BLP03558 hypothetical protein | Hypothetical protein [Bacillus licheniformis DSM 13] | UniRef100_Q65FT7 | Bacillus licheniformis DSM 13 |
| 3721 | menC O-succinylbenzoate-CoA synthase | MenC [Bacillus licheniformis DSM 13] | UniRef100_Q65FT6 | Bacillus licheniformis DSM 13 |
| 3722 | menE O-succinylbenzoic acid-CoA ligase | MenE [Bacillus licheniformis DSM 13] | UniRef100_Q65FT5 | Bacillus licheniformis DSM 13 |
| 3723 | menB dihydroxynapthoic acid synthetase | MenB [Bacillus licheniformis DSM 13] | UniRef100_Q65FT4 | Bacillus licheniformis DSM 13 |
| 3724 | menHA o-succinylbenzoate synthase | YtxM [Bacillus licheniformis DSM 13] | UniRef100_Q65FT3 | Bacillus licheniformis DSM 13 |
| 3725 | menD 2-oxoglutarate decarboxylase and 2-succinyl-6- | MenD [Bacillus licheniformis DSM 13] | UniRef100_Q65FT2 | Bacillus licheniformis DSM 13 |
| | hydroxy-2,4-cyclohexadiene-1-carboxylate synthase | | | |
| 3726 | menF menaquinone-specific isochorismate synthase | MenF [Bacillus licheniformis DSM 13] | UniRef100_Q65FT1 | Bacillus licheniformis DSM 13 |
| 3727 | BLP04784 hypothetical protein | | | |
| 3728 | menA 1,4-dihydroxy-2-naphthoate | MenA [Bacillus licheniformis DSM 13] | UniRef100_Q65FT0 | Bacillus licheniformis DSM 13 |
| | octaprenyltransferase | | | |
| 3729 | BLP03566 conserved hypothetical protein | YteA [Bacillus licheniformis DSM 13] | UniRef100_Q65FS9 | Bacillus licheniformis DSM 13 |
| 3730 | glgP glycogen phosphorylase_glycosyl transferase | GlgP [Bacillus licheniformis DSM 13] | UniRef100_Q65FS8 | Bacillus licheniformis DSM 13 |
| | family 35 | | | |
| 3731 | glgA starch synthase, glycosyl transferase family 5 | GlgA (Starch (glycogen) synthase) [Bacillus licheniformis | UniRef100_Q65FS7 | Bacillus licheniformis DSM 13 |
| | | DSM 13] | | |
| 3732 | glgD ADP-glucose pyrophosphorylase | GlgD [Bacillus licheniformis DSM 13] | UniRef100_Q65FS6 | Bacillus licheniformis DSM 13 |
| 3733 | glgC glucose-1-phosphate adenylyltransferase | GlgC [Bacillus licheniformis DSM 13] | UniRef100_Q65FS5 | Bacillus licheniformis DSM 13 |
| 3734 | glgB Glycoside Hydrolase Family 13 | GlgB [Bacillus licheniformis DSM 13] | UniRef100_Q65FS4 | Bacillus licheniformis DSM 13 |
| 3735 | BLP04785 hypothetical protein | | | |
| 3736 | BLP04786 hypothetical protein | Hypothetical protein [Bacillus licheniformis DSM 13] | UniRef100_Q65FS3 | Bacillus licheniformis DSM 13 |
| 3737 | BLP03572 hypothetical protein | | | |
| 3738 | BLP03574 transcriptional regulator | Hypothetical protein [Bacillus licheniformis DSM 13] | UniRef100_Q65FS1 | Bacillus licheniformis DSM 13 |
| 3739 | yuaJ hypothetical protein YuaJ | YuaJ [Bacillus licheniformis DSM 13] | UniRef100_Q65FS0 | Bacillus licheniformis DSM 13 |
| 3740 | BLP03576 putative peptidase, sortase like protein | Hypothetical protein [Bacillus licheniformis DSM 13] | UniRef100_Q65FR9 | Bacillus licheniformis DSM 13 |
| 3741 | BLP03577 hypothetical protein | Hypothetical Surface protein from Gram-positive cocci, | UniRef100_Q65FR8 | Bacillus licheniformis DSM 13 |
| | | anchor region [Bacillus licheniformis DSM 13] | | |
| 3742 | BLP03578 hypothetical protein | Hypothetical protein [Bacillus licheniformis DSM 13] | UniRef100_Q62R76 | Bacillus licheniformis DSM 13 |
| 3743 | rapD response regulator aspartate phosphatase | RapD [Bacillus licheniformis DSM 13] | UniRef100_Q65FR7 | Bacillus licheniformis DSM 13 |
| 3744 | BLP03580 conserved hypothetical protein | Hypothetical protein [Bacillus licheniformis DSM 13] | UniRef100_Q65FR6 | Bacillus licheniformis DSM 13 |
| 3745 | pcp pyrrolidone-carboxylate peptidase | Pcp [Bacillus licheniformis DSM 13] | UniRef100_Q65FR5 | Bacillus licheniformis DSM 13 |
| 3746 | ktrA K transporter subunit peripherally bound to the | YuaA [Bacillus licheniformis DSM 13] | UniRef100_Q65FR4 | Bacillus licheniformis DSM 13 |
| | cytoplasmic membrane | | | |
| 3747 | ktrB K transporter integral membrane subunit | Hypothetical protein [Bacillus licheniformis DSM 13] | UniRef100_Q65FR3 | Bacillus licheniformis DSM 13 |
| 3748 | BLP03584 hypothetical protein | Hypothetical protein [Bacillus licheniformis DSM 13] | UniRef100_Q62R71 | Bacillus licheniformis DSM 13 |
| 3749 | BLP03585 hypothetical protein | YuaE [Bacillus licheniformis DSM 13] | UniRef100_Q65FR1 | Bacillus licheniformis DSM 13 |
| 3750 | BLP04787 hypothetical protein | YuaD [Bacillus licheniformis DSM 13] | UniRef100_Q65FR0 | Bacillus licheniformis DSM 13 |
| 3751 | gbsB alcohol dehydrogenase | GbsB [Bacillus licheniformis DSM 13] | UniRef100_Q65FQ9 | Bacillus licheniformis DSM 13 |
| 3752 | gbsA glycine betaine aldehyde dehydrogenase | Glycine betaine aldehyde dehydrogenase [Bacillus | UniRef100_Q62R67 | Bacillus licheniformis DSM 13 |
| | | licheniformis DSM 13] | | |
| 3753 | BLP04788 hypothetical protein | | | |
| 3754 | BLP03588 hypothetical protein | YuaC [Bacillus licheniformis DSM 13] | UniRef100_Q65FQ7 | Bacillus licheniformis DSM 13 |
| 3755 | BLP03589 proline transporter | Hypothetical protein [Bacillus licheniformis DSM 13] | UniRef100_Q65FQ6 | Bacillus licheniformis DSM 13 |
| 3756 | ytkD conserved hypothetical protein | YktD [Bacillus licheniformis DSM 13] | UniRef100_Q65FQ5 | Bacillus licheniformis DSM 13 |
| 3757 | alr2 putative alanine racemase | YncD [Bacillus licheniformis DSM 13] | UniRef100_Q65FQ4 | Bacillus licheniformis DSM 13 |
| 3758 | BLP03592 putative Oxalate decarboxylase | YoaN1 [Bacillus licheniformis DSM 13] | UniRef100_Q65FQ3 | Bacillus licheniformis DSM 13 |
| 3759 | BLP04825 hypothetical protein | Hypothetical protein [Bacillus licheniformis DSM 13] | UniRef100_Q65FQ1 | Bacillus licheniformis DSM 13 |
| 3760 | BLP03593 hypothetical protein | Hypothetical protein [Bacillus licheniformis DSM 13] | UniRef100_Q65FQ0 | Bacillus licheniformis DSM 13 |
| 3761 | BLP03594 hypothetical protein | Hypothetical protein [Bacillus licheniformis DSM 13] | UniRef100_Q65FP9 | Bacillus licheniformis DSM 13 |
| 3762 | BLP03595 hypothetical protein | Hypothetical protein [Bacillus licheniformis DSM 13] | UniRef100_Q65FP8 | Bacillus licheniformis DSM 13 |
| 3763 | BLP03596 hypothetical protein | Hypothetical protein [Bacillus licheniformis DSM 13] | UniRef100_Q65FP7 | Bacillus licheniformis DSM 13 |
| 3764 | BLP03597 hypothetical protein | Hypothetical protein [Bacillus licheniformis DSM 13] | UniRef100_Q65FP6 | Bacillus licheniformis DSM 13 |
| 3765 | BLP03598 hypothetical protein | | | |
| 3766 | BLP03599 hypothetical protein | Hypothetical protein [Bacillus licheniformis DSM 13] | UniRef100_Q65FP5 | Bacillus licheniformis DSM 13 |
| 3767 | BLP03600 hypothetical protein | Hypothetical protein [Bacillus licheniformis DSM 13] | UniRef100_Q62R54 | Bacillus licheniformis DSM 13 |
| 3768 | BLP03601 hypothetical protein | Hypothetical protein [Bacillus licheniformis DSM 13] | UniRef100_Q65FP4 | Bacillus licheniformis DSM 13 |
| 3769 | ykoN putative Glycosyl Transferase Family 28 | YkoN [Bacillus licheniformis DSM 13] | UniRef100_Q65FP3 | Bacillus licheniformis DSM 13 |
| 3770 | BLP03603 hypothetical protein | | | |
| 3771 | ykoP hypothetical protein | YkoP [Bacillus licheniformis DSM 13] | UniRef100_Q65FP2 | Bacillus licheniformis DSM 13 |
| 3772 | ykoQ Metallophosphoesterase | YkoQ [Bacillus licheniformis DSM 13] | UniRef100_Q65FP1 | Bacillus licheniformis DSM 13 |
| 3773 | upk probable undecaprenol kinase | YubB [Bacillus licheniformis DSM 13] | UniRef100_Q65FP0 | Bacillus licheniformis DSM 13 |
| 3774 | BLP03607 conserved hypothetical protein | YubA [Bacillus licheniformis DSM 13] | UniRef100_Q65FN9 | Bacillus licheniformis DSM 13 |
| 3775 | yulF putative oxidoreductase | YulF [Bacillus licheniformis DSM 13] | UniRef100_Q65FN7 | Bacillus licheniformis DSM 13 |
| 3776 | yraA probable intracellular protease | YraA [Bacillus licheniformis DSM 13] | UniRef100_Q65FN6 | Bacillus licheniformis DSM 13 |
| 3777 | mcpB methyl-accepting chemotaxis protein | Hypothetical protein [Bacillus licheniformis DSM 13] | UniRef100_Q65FN5 | Bacillus licheniformis DSM 13 |
| 3778 | mcpAA methyl-accepting chemotaxis protein | McpA [Bacillus licheniformis DSM 13] | UniRef100_Q65FN4 | Bacillus licheniformis DSM 13 |
| 3779 | mcpAB methyl-accepting chemotaxis protein | Hypothetical protein [Bacillus licheniformis DSM 13] | UniRef100_Q65FN3 | Bacillus licheniformis DSM 13 |
| 3780 | BLP03613 hypothetical protein | | | |
| 3781 | tgl transglutaminase | Tgl [Bacillus licheniformis DSM 13] | UniRef100_Q65FN2 | Bacillus licheniformis DSM 13 |
| 3782 | yrpB putative Dihydroorotate dehydrogenase YrpB | YrpB [Bacillus licheniformis DSM 13] | UniRef100_Q65FN1 | Bacillus licheniformis DSM 13 |
| 3783 | yugU conserved protein YugU | Hypothetical protein yugU [Bacillus licheniformis DSM 13] | UniRef100_Q65FN0 | Bacillus licheniformis DSM 13 |
| 3784 | yugT Glycoside Hydrolase Family 13, YugT | YugT [Bacillus licheniformis DSM 13] | UniRef100_Q65FM9 | Bacillus licheniformis DSM 13 |
| 3785 | yfiR putative transcriptional regulator YfiR | YfiR [Bacillus licheniformis DSM 13] | UniRef100_Q65FM8 | Bacillus licheniformis DSM 13 |
| 3786 | BLP03619 Ribosomal protein L29 | YqeB [Bacillus licheniformis DSM 13] | UniRef100_Q65FM7 | Bacillus licheniformis DSM 13 |
| 3787 | BLP03620 Glycoside Hydrolase Family 12 | Endo-beta-1,4-glucanase [Bacillus licheniformis] | UniRef100_Q7X4S4 | Bacillus licheniformis |
| 3788 | yugS YugS | YugS [Bacillus licheniformis DSM 13] | UniRef100_Q65FM5 | Bacillus licheniformis DSM 13 |
| 3789 | yugP conserved protein YugP | Hypothetical protein yugP [Bacillus licheniformis DSM 13] | UniRef100_Q65FM4 | Bacillus licheniformis DSM 13 |
| 3790 | BLP03623 conserved hypothetical protein | Hypothetical protein [Bacillus licheniformis DSM 13] | UniRef100_Q65FM3 | Bacillus licheniformis DSM 13 |
| 3791 | | Hypothetical protein yugO [Bacillus licheniformis DSM 13] | UniRef100_Q65FM2 | Bacillus licheniformis DSM 13 |
| 3792 | yugO conserved putative K+ channel protein YugO | YugO [Bacillus licheniformis DSM 13] | UniRef100_Q65FM1 | Bacillus licheniformis DSM 13 |
| 3793 | yugN conserved protein YugN | Hypothetical protein yugN [Bacillus licheniformis DSM 13] | UniRef100_Q65FM0 | Bacillus licheniformis DSM 13 |
| 3794 | BLP03626 hypothetical protein | YdfR [Bacillus licheniformis DSM 13] | UniRef100_Q65FL9 | Bacillus licheniformis DSM 13 |
| 3795 | ytaB hypothetical membrane protein | YtaB [Bacillus licheniformis DSM 13] | UniRef100_Q65FL8 | Bacillus licheniformis DSM 13 |
| 3796 | BLP03628 putative N-acetyltransferase | Hypothetical protein [Bacillus licheniformis DSM 13] | UniRef100_Q65FL7 | Bacillus licheniformis DSM 13 |
| 3797 | pgi glucose-6-phosphate isomerase | Pgi [Bacillus licheniformis DSM 13] | UniRef100_Q65FL6 | Bacillus licheniformis DSM 13 |
| 3798 | new hypothetical protein | Hypothetical protein [Bacillus licheniformis DSM 13] | UniRef100_Q65FL5 | Bacillus licheniformis DSM 13 |
| 3799 | BLP03630 hypothetical protein | | | |
| 3800 | yugJ Iron-containing alcohol dehydrogenase YugJ | YugJ [Bacillus licheniformis DSM 13] | UniRef100_Q65FL4 | Bacillus licheniformis DSM 13 |
| 3801 | yuzA conserved protein YuzA | Hypothetical protein yuzA [Bacillus licheniformis DSM 13] | UniRef100_Q65FL3 | Bacillus licheniformis DSM 13 |
| 3802 | yugI putative polynbonucleotide nucleotidyltransferase | YugI [Bacillus licheniformis DSM 13] | UniRef100_Q65FL2 | Bacillus licheniformis DSM 13 |
| | YugI | | | |
| 3803 | alaT alanine transaminase | AlaT [Bacillus licheniformis DSM 13] | UniRef100_Q65FL1 | Bacillus licheniformis DSM 13 |
| 3804 | alaR transcriptional regulator (Lrp_AsnC family) | AlaR [Bacillus licheniformis DSM 13] | UniRef100_Q65FL0 | Bacillus licheniformis DSM 13 |
| 3805 | yugF putative hydrolase YugF | YugF [Bacillus licheniformis DSM 13] | UniRef100_Q65FK9 | Bacillus licheniformis DSM 13 |
| 3806 | yugE YugE | Hypothetical protein yugE [Bacillus licheniformis DSM 13] | UniRef100_Q62R20 | Bacillus licheniformis DSM 13 |
| 3807 | BLP03638 hypothetical protein | Hypothetical protein [Bacillus licheniformis DSM 13] | UniRef100_Q65FK7 | Bacillus licheniformis DSM 13 |
| 3808 | patB aminotransferase PatB | PatB [Bacillus licheniformis DSM 13] | UniRef100_Q65FK6 | Bacillus licheniformis DSM 13 |
| 3809 | BLP03640 hypothetical protein | Hypothetical protein [Bacillus licheniformis DSM 13] | UniRef100_Q65FK5 | Bacillus licheniformis DSM 13 |
| 3810 | kapB kinase-associated protein B | KapB [Bacillus licheniformis DSM 13] | UniRef100_Q65FK4 | Bacillus licheniformis DSM 13 |
| 3811 | kapD KapD | Hypothetical protein kapD [Bacillus licheniformis DSM 13] | UniRef100_Q65FK3 | Bacillus licheniformis DSM 13 |
| 3812 | BLP03643 putative transporter | YuxJ [Bacillus licheniformis DSM 13] | UniRef100_Q65FK2 | Bacillus licheniformis DSM 13 |
| 3813 | pbpD penicillin-binding protein_Glycosyl Transferase | PbpD [Bacillus licheniformis DSM 13] | UniRef100_Q65FK1 | Bacillus licheniformis DSM 13 |
| | Family 51 | | | |
| 3814 | yuxK conserved protein YuxK | Hypothetical protein yuxK [Bacillus licheniformis DSM 13] | UniRef100_Q65FK0 | Bacillus licheniformis DSM 13 |
| 3815 | BLP03646 hypothetical protein | YufK [Bacillus licheniformis DSM 13] | UniRef100_Q65FJ9 | Bacillus licheniformis DSM 13 |
| 3816 | BLP03647 putative Histidine kinase | YufL [Bacillus licheniformis DSM 13] | UniRef100_Q65FJ8 | Bacillus licheniformis DSM 13 |
| 3817 | malR hypothetical conserved protein | YufM [Bacillus licheniformis DSM 13] | UniRef100_Q65FJ7 | Bacillus licheniformis DSM 13 |
| 3818 | BLP03649 hypothetical protein | | | |
| 3819 | yufQ conserved hypothetical YufQ | Hypothetical protein yufQ [Bacillus subtilis] | UniRef100_O05255 | Bacillus subtilis |
| 3820 | pssA phosphatidylserine synthase | PssA [Bacillus licheniformis DSM 13] | UniRef100_Q65FJ5 | Bacillus licheniformis DSM 13 |
| 3821 | ybfM hypothetical protein | YbfM [Bacillus licheniformis DSM 13] | UniRef100_Q65FJ4 | Bacillus licheniformis DSM 13 |
| 3822 | psd phosphatidylserine decarboxylase Psd | Psd [Bacillus licheniformis DSM 13] | UniRef100_Q65FJ3 | Bacillus licheniformis DSM 13 |
| 3823 | maeN Na_malate symporter MaeN | MaeN [Bacillus licheniformis DSM 13] | UniRef100_Q65FJ0 | Bacillus licheniformis DSM 13 |
| 3824 | BLP03654 hypothetical protein | Hypothetical protein [Bacillus licheniformis DSM 13] | UniRef100_Q65FI9 | Bacillus licheniformis DSM 13 |
| 3825 | BLP03655 hypothetical protein | | | |
| 3826 | mrpA Na_H antiporter MrpA | MrpA [Bacillus licheniformis DSM 13] | UniRef100_Q65FI8 | Bacillus licheniformis DSM 13 |
| 3827 | mrpB MrpA | Hypothetical protein mrpB [Bacillus licheniformis DSM 13] | UniRef100_Q65FI7 | Bacillus licheniformis DSM 13 |
| 3828 | mrpC MrpC | Hypothetical protein mrpC [Bacillus licheniformis DSM 13] | UniRef100_Q65FI6 | Bacillus licheniformis DSM 13 |
| 3829 | mrpD MrpD | MrpD [Bacillus licheniformis DSM 13] | UniRef100_Q65FI5 | Bacillus licheniformis DSM 13 |
| 3830 | mrpE MrpE | Hypothetical protein mrpE [Bacillus licheniformis DSM 13] | UniRef100_Q65FI4 | Bacillus licheniformis DSM 13 |
| 3831 | mrpF probable efflux system for Na and cholate MrpF | MrpF [Bacillus licheniformis DSM 13] | UniRef100_Q65FI3 | Bacillus licheniformis DSM 13 |
| 3832 | mrpG MrpG | Hypothetical protein mrpG [Bacillus licheniformis DSM 13] | UniRef100_Q65FI2 | Bacillus licheniformis DSM 13 |
| 3833 | yuxO comA operon protein 2 ComA2 | YuxO protein [Bacillus licheniformis] | UniRef100_Q8VQ60 | Bacillus licheniformis |
| 3834 | comA two-component response regulator | ComA [Bacillus licheniformis DSM 13] | UniRef100_Q65FI0 | Bacillus licheniformis DSM 13 |
| 3835 | comP ComP | Histidine kinase sensor protein [Bacillus mojavensis] | UniRef100_Q8VQE5 | Bacillus mojavensis |
| 3836 | | | | |
| 3837 | comQ transcriptional regulator | ComQ protein [Bacillus licheniformis] | UniRef100_Q8VQ63 | Bacillus licheniformis |
| 3838 | degQ DegQ | Degradation enzyme regulation protein degQ [Bacillus | UniRef100_P12051 | Bacillus licheniformis |
| | | licheniformis] | | |
| 3839 | BLP03669 hypothetical protein | | | |
| 3840 | yuzC conserved protein YuzC | YuzC protein [Bacillus licheniformis] | UniRef100_Q8VQ64 | Bacillus licheniformis |
| 3841 | yuxH putative Acyl-coA-binding protein YuxH | YuxH [Bacillus licheniformis DSM 13] | UniRef100_Q65FH1 | Bacillus licheniformis DSM 13 |
| 3842 | pncB Nicotinate phosphoribosyltransferase related | YueK [Bacillus licheniformis DSM 13] | UniRef100_Q65FH0 | Bacillus licheniformis DSM 13 |
| 3843 | BLP03673 Isochorismatase hydrolase | YueJ [Bacillus licheniformis DSM 13] | UniRef100_Q65FG9 | Bacillus licheniformis DSM 13 |
| 3844 | yueI hypothetical protein | Hypothetical protein [Bacillus licheniformis DSM 13] | UniRef100_Q62QY3 | Bacillus licheniformis DSM 13 |
| 3845 | yueH hypothetical protein | YueH [Bacillus licheniformis DSM 13] | UniRef100_Q65FG7 | Bacillus licheniformis DSM 13 |
| 3846 | yueG conserved hypothetical protein YueG | YueG [Bacillus licheniformis DSM 13] | UniRef100_Q65FG6 | Bacillus licheniformis DSM 13 |
| 3847 | yueF hypothetical protein | Hypothetical protein [Bacillus licheniformis DSM 13] | UniRef100_Q62QY0 | Bacillus licheniformis DSM 13 |
| 3848 | BLP03678 conserved hypothetical protein | Hypothetical protein [Bacillus licheniformis DSM 13] | UniRef100_Q65FG4 | Bacillus licheniformis DSM 13 |
| 3849 | BLP03679 putative Esterase_lipase_thioesterase | Hypothetical protein [Bacillus licheniformis DSM 13] | UniRef100_Q65FG3 | Bacillus licheniformis DSM 13 |
| 3850 | BLP03680 conserved hypothetical protein | Hypothetical protein [Bacillus licheniformis DSM 13] | UniRef100_Q65FG2 | Bacillus licheniformis DSM 13 |
| 3851 | yueE hypothetical protein | YueE [Bacillus licheniformis DSM 13] | UniRef100_Q65FG1 | Bacillus licheniformis DSM 13 |
| 3852 | yueD putative benzil reductase | YueD [Bacillus licheniformis DSM 13] | UniRef100_Q65FG0 | Bacillus licheniformis DSM 13 |
| 3853 | yueC hypothetical protein | Hypothetical protein [Bacillus licheniformis DSM 13] | UniRef100_Q62QX4 | Bacillus licheniformis DSM 13 |
| 3854 | yueB Eukaryotic DNA topoisomerases I, dispensable | YueB [Bacillus licheniformis DSM 13] | UniRef100_Q65FF8 | Bacillus licheniformis DSM 13 |
| | insert | | | |
| 3855 | yukA conserved protein YukA | YukA [Bacillus licheniformis DSM 13] | UniRef100_Q65FF7 | Bacillus licheniformis DSM 13 |
| 3856 | yukC conserved protein YukC | Hypothetical protein yukC [Bacillus licheniformis DSM 13] | UniRef100_Q65FF6 | Bacillus licheniformis DSM 13 |
| 3857 | yukD conserved ubiqutin-like protein YukD | Hypothetical protein yukD [Bacillus licheniformis DSM 13] | UniRef100_Q65FF5 | Bacillus licheniformis DSM 13 |
| 3858 | yukE conserved protein YukE | Hypothetical protein yukE [Bacillus licheniformis DSM 13] | UniRef100_Q65FF4 | Bacillus licheniformis DSM 13 |
| 3859 | BLP03689 putative Sodium:alanine symporter | Hypothetical protein [Bacillus licheniformis DSM 13] | UniRef100_Q65FF3 | Bacillus licheniformis DSM 13 |
| 3860 | yukF conserved protein YukF | YukF [Bacillus licheniformis DSM 13] | UniRef100_Q65FF2 | Bacillus licheniformis DSM 13 |
| 3861 | ald L-alanine dehydrogenase | Ald [Bacillus licheniformis DSM 13] | UniRef100_Q65FF1 | Bacillus licheniformis DSM 13 |
| 3862 | BLP03692 hypothetical protein | Hypothetical protein [Bacillus licheniformis DSM 13] | UniRef100_Q65FF0 | Bacillus licheniformis DSM 13 |
| 3863 | yuiH Oxidoreductase YuiH | YuiH [Bacillus licheniformis DSM 13] | UniRef100_Q65FE9 | Bacillus licheniformis DSM 13 |
| 3864 | bioY biotin metabolism protein BioY | YuiG [Bacillus licheniformis DSM 13] | UniRef100_Q65FE8 | Bacillus licheniformis DSM 13 |
| 3865 | yuiF Na_H antiporter YuiF | YuiF [Bacillus licheniformis DSM 13] | UniRef100_Q65FE7 | Bacillus licheniformis DSM 13 |
| 3866 | pepA Peptidase M17, cytosol aminopeptidase, C- | YuiE [Bacillus licheniformis DSM 13] | UniRef100_Q65FE6 | Bacillus licheniformis DSM 13 |
| | terminal | | | |
| 3867 | yuiD conserved membrane protein YuiD | Hypothetical protein yuiD [Bacillus licheniformis DSM 13] | UniRef100_Q65FE5 | Bacillus licheniformis DSM 13 |
| 3868 | yuiC conserved protein YuiC | 3.0 [Bacillus licheniformis DSM 13] | UniRef100_Q62QV9 | Bacillus licheniformis DSM 13 |
| 3869 | yuiB conserved membrane protein YuiB | Hypothetical protein yuiB [Bacillus licheniformis DSM 13] | UniRef100_Q65FE3 | Bacillus licheniformis DSM 13 |
| 3870 | yuiA conserved protein YuiA | Hypothetical protein yuiA [Bacillus licheniformis DSM 13] | UniRef100_Q65FE2 | Bacillus licheniformis DSM 13 |
| 3871 | yumB FAD-dependent pyridine nucleotide-disulphide | YumB [Bacillus licheniformis DSM 13] | UniRef100_Q65FE1 | Bacillus licheniformis DSM 13 |
| | oxidoreductase YumB | | | |
| 3872 | BLP03701 hypothetical protein | | | |
| 3873 | yumC FAD-dependent pyridine nucleotide-disulphide | YumC [Bacillus licheniformis DSM 13] | UniRef100_Q65FE0 | Bacillus licheniformis DSM 13 |
| | oxidoreductase YumC | | | |
| 3874 | BLP03703 hypothetical protein | Hypothetical protein [Bacillus licheniformis DSM 13] | UniRef100_Q62QV4 | Bacillus licheniformis DSM 13 |
| 3875 | ydjO YdjO | Hypothetical protein ydjO [Bacillus licheniformis DSM 13] | UniRef100_Q65FD9 | Bacillus licheniformis DSM 13 |
| 3876 | yxbD GCN5-related N-acetyltransferase | YxbD [Bacillus licheniformis DSM 13] | UniRef100_Q65FD8 | Bacillus licheniformis DSM 13 |
| 3877 | yutM conserved protein YutM | YutM [Bacillus licheniformis DSM 13] | UniRef100_Q65FD7 | Bacillus licheniformis DSM 13 |
| 3878 | dapF diaminopimelate epimerase | DapF [Bacillus licheniformis DSM 13] | UniRef100_Q65FD6 | Bacillus licheniformis DSM 13 |
| 3879 | BLP03707 hypothetical protein | | | |
| 3880 | yutK putative nucleoside uptake transporter YutK | YutK [Bacillus licheniformis DSM 13] | UniRef100_Q65FD5 | Bacillus licheniformis DSM 13 |
| 3881 | BLP03709 hypothetical protein | | | |
| 3882 | yuzB conserved protein YuzB | Hypothetical protein yuzB [Bacillus licheniformis DSM 13] | UniRef100_Q65FD4 | Bacillus licheniformis DSM 13 |
| 3883 | yutJ putative NADH dehydrogenase YutJ | YutJ [Bacillus licheniformis DSM 13] | UniRef100_Q65FD3 | Bacillus licheniformis DSM 13 |
| 3884 | ydhG conserved hypothetical protein YdhG | YdhG [Bacillus licheniformis DSM 13] | UniRef100_Q65FD2 | Bacillus licheniformis DSM 13 |
| 3885 | BLP03713 conserved hypothetical protein | Hypothetical protein [Bacillus licheniformis DSM 13] | UniRef100_Q65FD1 | Bacillus licheniformis DSM 13 |
| 3886 | BLP03714 response regulator aspartate phosphatase | Hypothetical protein [Bacillus licheniformis DSM 13] | UniRef100_Q65FD0 | Bacillus licheniformis DSM 13 |
| 3887 | padC phenolic acid decarboxylase | PadC [Bacillus licheniformis DSM 13] | UniRef100_Q65FC9 | Bacillus licheniformis DSM 13 |
| 3888 | BLP03716 hypothetical protein | YraG [Bacillus licheniformis DSM 13] | UniRef100_Q65FC8 | Bacillus licheniformis DSM 13 |
| 3889 | yuzD conserved protein YuzD | YuzD [Bacillus licheniformis DSM 13] | UniRef100_Q65FC7 | Bacillus licheniformis DSM 13 |
| 3890 | yutI Conserved protein YutI | YutI [Bacillus licheniformis DSM 13] | UniRef100_Q65FC6 | Bacillus licheniformis DSM 13 |
| 3891 | yuxL putative acylaminoacyl-peptidase YuxL | YuxL [Bacillus licheniformis DSM 13] | UniRef100_Q65FC5 | Bacillus licheniformis DSM 13 |
| 3892 | thrB homoserine kinase | ThrB [Bacillus licheniformis DSM 13] | UniRef100_Q65FC4 | Bacillus licheniformis DSM 13 |
| 3893 | thrC threonine synthase | ThrC [Bacillus licheniformis DSM 13] | UniRef100_Q65FC3 | Bacillus licheniformis DSM 13 |
| 3894 | hom homoserine dehydrogenase | Hom [Bacillus licheniformis DSM 13] | UniRef100_Q65FC2 | Bacillus licheniformis DSM 13 |
| 3895 | BLP03723 D-isomer specific 2-hydroxyacid | Hypothetical protein [Bacillus licheniformis DSM 13] | UniRef100_Q65FC1 | Bacillus licheniformis DSM 13 |
| | dehydrogenase, NAD binding domain, D-isomer | | | |
| | specific 2-hydroxyacid dehydrogenase, NAD binding | | | |
| | domain | | | |
| 3896 | yutH conserved protein YutH | Hypothetical protein yutH [Bacillus licheniformis DSM 13] | UniRef100_Q62QT5 | Bacillus licheniformis DSM 13 |
| 3897 | yutG conserved protein YutG | Hypothetical protein yutG [Bacillus licheniformis DSM 13] | UniRef100_Q62QT4 | Bacillus licheniformis DSM 13 |
| 3898 | yutF putative HAD-superfamily subfamily IIA | YutF [Bacillus licheniformis DSM 13] | UniRef100_Q65FB8 | Bacillus licheniformis DSM 13 |
| | hydrolase | | | |
| 3899 | yutE conserved protein YutE | Hypothetical protein yutE [Bacillus licheniformis DSM 13] | UniRef100_Q65FB7 | Bacillus licheniformis DSM 13 |
| 3900 | yutD conserved protein YutD | Hypothetical protein yutD [Bacillus licheniformis DSM 13] | UniRef100_Q65FB6 | Bacillus licheniformis DSM 13 |
| 3901 | yutC conserved protein YutC | Hypothetical protein yutC [Bacillus licheniformis DSM 13] | UniRef100_Q65FB5 | Bacillus licheniformis DSM 13 |
| 3902 | lipA lipoic acid synthetase | LipA [Bacillus licheniformis DSM 13] | UniRef100_Q65FB4 | Bacillus licheniformis DSM 13 |
| 3903 | yunA putative metallopeptidase | YunA [Bacillus licheniformis DSM 13] | UniRef100_Q65FB3 | Bacillus licheniformis DSM 13 |
| 3904 | BLP03732 hypothetical protein | | | |
| 3905 | BLP03733 putative sodium dependent transporter | Hypothetical protein [Bacillus licheniformis DSM 13] | UniRef100_Q65FB1 | Bacillus licheniformis DSM 13 |
| 3906 | yunB conserved protein YunB | Hypothetical protein yunB [Bacillus licheniformis DSM 13] | UniRef100_Q65FB0 | Bacillus licheniformis DSM 13 |
| 3907 | yunC conserved protein YunC | Hypothetical protein yunC [Bacillus licheniformis DSM 13] | UniRef100_Q65FA9 | Bacillus licheniformis DSM 13 |
| 3908 | yunD putative nucleotidase YunD | YunD [Bacillus licheniformis DSM 13] | UniRef100_Q65FA8 | Bacillus licheniformis DSM 13 |
| 3909 | yunE conserved protein YunE | Hypothetical protein yunE [Bacillus licheniformis DSM 13] | UniRef100_Q65FA7 | Bacillus licheniformis DSM 13 |
| 3910 | yunF conserved protein YunF | Hypothetical protein yunF [Bacillus licheniformis DSM 13] | UniRef100_Q65FA6 | Bacillus licheniformis DSM 13 |
| 3911 | BLP04789 hypothetical protein | | | |
| 3912 | ymcC hypothetical protein | YmcC [Bacillus licheniformis DSM 13] | UniRef100_Q65FA5 | Bacillus licheniformis DSM 13 |
| 3913 | pksA transcriptional regulator | Hypothetical protein [Bacillus licheniformis DSM 13] | UniRef100_Q65FA4 | Bacillus licheniformis DSM 13 |
| 3914 | BLP03741 hypothetical protein | Hypothetical protein [Bacillus licheniformis DSM 13] | UniRef100_Q65FA3 | Bacillus licheniformis DSM 13 |
| 3915 | BLP03742 hypothetical protein | | | |
| 3916 | BLP03743 hypothetical protein | | | |
| 3917 | BLP03744 hypothetical protein | YurG [Bacillus licheniformis DSM 13] | UniRef100_Q65FA2 | Bacillus licheniformis DSM 13 |
| 3918 | BLP03745 putative | YurH [Bacillus licheniformis DSM 13] | UniRef100_Q65FA1 | Bacillus licheniformis DSM 13 |
| | allointase_hydantoinase_amidohydrolase protein | | | |
| 3919 | BLP03746 hypothetical protein | PucR [Bacillus licheniformis DSM 13] | UniRef100_Q65FA0 | Bacillus licheniformis DSM 13 |
| 3920 | blt multidrug-efflux transporter | Blt [Bacillus licheniformis DSM 13] | UniRef100_Q65F99 | Bacillus licheniformis DSM 13 |
| 3921 | BLP03748 C4-dicarboxylate anaerobic carrier | Hypothetical protein [Bacillus licheniformis DSM 13] | UniRef100_Q65F98 | Bacillus licheniformis DSM 13 |
| 3922 | BLP03749 hyopthetical protein | | | |
| 3923 | BLP03750 anthranilate phosphoribosyltransferase | Hypothetical protein [Bacillus licheniformis DSM 13] | UniRef100_Q65F97 | Bacillus licheniformis DSM 13 |
| 3924 | BLP03751 putative transferase | Hypothetical protein [Bacillus licheniformis DSM 13] | UniRef100_Q65F96 | Bacillus licheniformis DSM 13 |
| 3925 | bsn extracellular ribonuclease | YurI [Bacillus licheniformis DSM 13] | UniRef100_Q65F95 | Bacillus licheniformis DSM 13 |
| 3926 | BLP03753 hypothetical protein | | | |
| 3927 | BLP03754 hypothetical protein | PucC [Bacillus licheniformis DSM 13] | UniRef100_Q65F94 | Bacillus licheniformis DSM 13 |
| 3928 | yurR YurR | YurR [Bacillus licheniformis DSM 13] | UniRef100_Q65F93 | Bacillus licheniformis DSM 13 |
| 3929 | BLP03756 hypothetical protein | Hypothetical protein [Bacillus licheniformis DSM 13] | UniRef100_Q65F92 | Bacillus licheniformis DSM 13 |
| 3930 | BLP03757 hypothetical protein | Hypothetical protein [Bacillus licheniformis DSM 13] | UniRef100_Q65F91 | Bacillus licheniformis DSM 13 |
| 3931 | BLP04790 hypothetical protein | | | |
| 3932 | rapI response regulator aspartate phosphatase | RapI [Bacillus licheniformis DSM 13] | UniRef100_Q65F90 | Bacillus licheniformis DSM 13 |
| 3933 | sufB FeS assembly protein SufB | YurU [Bacillus licheniformis DSM 13] | UniRef100_Q65F89 | Bacillus licheniformis DSM 13 |
| 3934 | nifU Nitrogen-fixing protein NifU | YurV [Bacillus licheniformis DSM 13] | UniRef100_Q65F88 | Bacillus licheniformis DSM 13 |
| 3935 | csd cysteine desulfurase | Csd [Bacillus licheniformis DSM 13] | UniRef100_Q65F87 | Bacillus licheniformis DSM 13 |
| 3936 | yurX conserved protein involved in Fe—S cluster | YurX [Bacillus licheniformis DSM 13] | UniRef100_Q65F86 | Bacillus licheniformis DSM 13 |
| | formation YurX | | | |
| 3937 | yurY ATP-binding protein involved in Fe—S cluster | YurY [Bacillus licheniformis DSM 13] | UniRef100_Q65F85 | Bacillus licheniformis DSM 13 |
| | formation YurY | | | |
| 3938 | BLP03764 hypothetical protein | | | |
| 3939 | czcD cation-efflux system membrane protein | CzcD [Bacillus licheniformis DSM 13] | UniRef100_Q65F84 | Bacillus licheniformis DSM 13 |
| 3940 | BLP03766 hypothetical protein | Hypothetical protein [Bacillus licheniformis DSM 13] | UniRef100_Q62QP9 | Bacillus licheniformis DSM 13 |
| 3941 | yurZ conserved protein YurZ | YurZ [Bacillus licheniformis DSM 13] | UniRef100_Q65F83 | Bacillus licheniformis DSM 13 |
| 3942 | yusA putative ABC transport system substrate-binding | YusA [Bacillus licheniformis DSM 13] | UniRef100_Q65F82 | Bacillus licheniformis DSM 13 |
| | protein YusA | | | |
| 3943 | yusB Binding-protein-dependent transport systems | YusB [Bacillus licheniformis DSM 13] | UniRef100_Q65F81 | Bacillus licheniformis DSM 13 |
| | inner membrane component, YusB | | | |
| 3944 | yusC ABC transport system ATP-binding protein | YusC [Bacillus licheniformis DSM 13] | UniRef100_Q65F80 | Bacillus licheniformis DSM 13 |
| | YusC | | | |
| 3945 | yusD YusD | Hypothetical protein yusD [Bacillus licheniformis DSM 13] | UniRef100_Q65F79 | Bacillus licheniformis DSM 13 |
| 3946 | yusE YusE | YusE [Bacillus licheniformis DSM 13] | UniRef100_Q65F78 | Bacillus licheniformis DSM 13 |
| 3947 | yusF conserved nucleic acid binding protein YusF | YusF [Bacillus licheniformis DSM 13] | UniRef100_Q65F77 | Bacillus licheniformis DSM 13 |
| 3948 | yusG conserved hypothetical protein YusG | Hypothetical protein yusG [Bacillus licheniformis DSM 13] | UniRef100_Q62QP1 | Bacillus licheniformis DSM 13 |
| 3949 | gcvH glycine cleavage system protein H | GcvH [Bacillus licheniformis DSM 13] | UniRef100_Q65F75 | Bacillus licheniformis DSM 13 |
| 3950 | yusI Conserved hypothetical protein YusI | Hypothetical protein yusI [Bacillus licheniformis DSM 13] | UniRef100_Q65F74 | Bacillus licheniformis DSM 13 |
| 3951 | yusJ Acyl-CoA dehydrogenase YusJ | YusJ [Bacillus licheniformis DSM 13] | UniRef100_Q65F73 | Bacillus licheniformis DSM 13 |
| 3952 | yusK putative acetyl-CoA C-acyltransferase YusK | YusK [Bacillus licheniformis DSM 13] | UniRef100_Q65F72 | Bacillus licheniformis DSM 13 |
| 3953 | yusL 3-hydroxyacyl-CoA dehydrogenase_enoyl-CoA | YusL [Bacillus licheniformis DSM 13] | UniRef100_Q65F71 | Bacillus licheniformis DSM 13 |
| | hydratase YusL | | | |
| 3954 | BLP03780 hypothetical protein | Hypothetical protein [Bacillus licheniformis DSM 13] | UniRef100_Q65F70 | Bacillus licheniformis DSM 13 |
| 3955 | BLP03781 hypothetical protein | Hypothetical protein [Bacillus licheniformis DSM 13] | UniRef100_Q65F69 | Bacillus licheniformis DSM 13 |
| 3956 | yusN conserved protein YusN | Hypothetical protein yusN [Bacillus licheniformis DSM 13] | UniRef100_Q65F68 | Bacillus licheniformis DSM 13 |
| 3957 | yusU conserved protein YusU | Hypothetical protein yusU [Bacillus licheniformis DSM 13] | UniRef100_Q65F67 | Bacillus licheniformis DSM 13 |
| 3958 | BLP03784 hypothetical protein | Hypothetical protein [Bacillus licheniformis DSM 13] | UniRef100_Q65F66 | Bacillus licheniformis DSM 13 |
| 3959 | yusV ABC transporter | YusV [Bacillus licheniformis DSM 13] | UniRef100_Q65F65 | Bacillus licheniformis DSM 13 |
| 3960 | yfhA ABC transport system permease protein | YfhA [Bacillus licheniformis DSM 13] | UniRef100_Q65F64 | Bacillus licheniformis DSM 13 |
| 3961 | yfiZ ABC transport system permease protein | YfiZ [Bacillus licheniformis DSM 13] | UniRef100_Q65F63 | Bacillus licheniformis DSM 13 |
| 3962 | yfiY ABC transport system substrate-binding protein | YfiY [Bacillus licheniformis DSM 13] | UniRef100_Q65F62 | Bacillus licheniformis DSM 13 |
| 3963 | yusW YusW | Hypothetical protein yusW [Bacillus licheniformis DSM 13] | UniRef100_Q65F61 | Bacillus licheniformis DSM 13 |
| 3964 | yusX Peptidase M, neutral zinc metallopeptidases | YusX [Bacillus licheniformis DSM 13] | UniRef100_Q65F60 | Bacillus licheniformis DSM 13 |
| 3965 | BLP03791 putative carboxypeptidase | Hypothetical protein [Bacillus licheniformis DSM 13] | UniRef100_Q65F59 | Bacillus licheniformis DSM 13 |
| 3966 | yusZ Short-chain dehydrogenase_reductase YusZ | YusZ [Bacillus licheniformis DSM 13] | UniRef100_Q65F58 | Bacillus licheniformis DSM 13 |
| 3967 | mrgA metalloregulation DNA-binding stress protein | MrgA [Bacillus licheniformis DSM 13] | UniRef100_Q65F57 | Bacillus licheniformis DSM 13 |
| 3968 | htrB putative serine protease | YvtA [Bacillus licheniformis DSM 13] | UniRef100_Q65F56 | Bacillus licheniformis DSM 13 |
| 3969 | BLP03795 hypothetical protein | | | |
| 3970 | cssR two-component response regulator | CssR [Bacillus licheniformis DSM 13] | UniRef100_Q65F55 | Bacillus licheniformis DSM 13 |
| 3971 | cssS two-component sensor histidine kinase | CssS [Bacillus licheniformis DSM 13] | UniRef100_Q65F54 | Bacillus licheniformis DSM 13 |
| 3972 | BLP03798 hypothetical protein | Hypothetical protein [Bacillus licheniformis DSM 13] | UniRef100_Q65F53 | Bacillus licheniformis DSM 13 |
| 3973 | yuxN probable transcriptional regulator YuxN | YuxN [Bacillus licheniformis DSM 13] | UniRef100_Q65F52 | Bacillus licheniformis DSM 13 |
| 3974 | citG fumarate hydratase class II CitG | CitG [Bacillus licheniformis DSM 13] | UniRef100_Q65F51 | Bacillus licheniformis DSM 13 |
| 3975 | BLP03801 hypothetical protein | Hypothetical protein [Bacillus licheniformis DSM 13] | UniRef100_Q65F50 | Bacillus licheniformis DSM 13 |
| 3976 | gerAA spore germination protein | Hypothetical protein gerAA [Bacillus licheniformis DSM 13] | UniRef100_Q65F49 | Bacillus licheniformis DSM 13 |
| 3977 | gerAB spore germination protein | Hypothetical protein gerAB [Bacillus licheniformis DSM 13] | UniRef100_Q65F48 | Bacillus licheniformis DSM 13 |
| 3978 | gerAC spore germination protein A3 precursor | Hypothetical protein gerAC [Bacillus licheniformis DSM 13] | UniRef100_Q65F47 | Bacillus licheniformis DSM 13 |
| 3979 | BLP03805 hypothetical protein | Hypothetical protein [Bacillus licheniformis DSM 13] | UniRef100_Q65F46 | Bacillus licheniformis DSM 13 |
| 3980 | liaR two-component response regulator LiaR | YvqC [Bacillus licheniformis DSM 13] | UniRef100_Q65F45 | Bacillus licheniformis DSM 13 |
| 3981 | liaS two-component sensor histidine kinase LiaS | YvqE [Bacillus licheniformis DSM 13] | UniRef100_Q65F44 | Bacillus licheniformis DSM 13 |
| 3982 | liaF conserved protein LiaF | Hypothetical protein yvqF [Bacillus licheniformis DSM 13] | UniRef100_Q65F43 | Bacillus licheniformis DSM 13 |
| 3983 | liaG conserved protein LiaG | YvqG [Bacillus licheniformis DSM 13] | UniRef100_Q65F42 | Bacillus licheniformis DSM 13 |
| 3984 | liaH putative phage shock protein YvqH | YvqH [Bacillus licheniformis DSM 13] | UniRef100_Q65F41 | Bacillus licheniformis DSM 13 |
| 3985 | liaI conserved membrane protein Lial | Hypothetical protein yvql [Bacillus licheniformis DSM 13] | UniRef100_Q65F40 | Bacillus licheniformis DSM 13 |
| 3986 | BLP03812 Carbohydrate Esterase Family 8 protein | Hypothetical protein [Bacillus licheniformis DSM 13] | UniRef100_Q65F39 | Bacillus licheniformis DSM 13 |
| 3987 | yvqK conserved protein YvqK | Hypothetical protein yvqK [Bacillus licheniformis DSM 13] | UniRef100_Q65F38 | Bacillus licheniformis DSM 13 |
| 3988 | BLP03814 putative acyl carrier protein reductase | Hypothetical protein [Bacillus licheniformis DSM 13] | UniRef100_Q65F37 | Bacillus licheniformis DSM 13 |
| 3989 | BLP03816 4-hydroxythreonine-4-phosphate | | | |
| | dehydrogenase | | | |
| 3990 | BLP03817 putative dehydrogenase | Hypothetical protein [Bacillus licheniformis DSM 13] | UniRef100_Q65F35 | Bacillus licheniformis DSM 13 |
| 3991 | BLP03818 putative dihydrodipicolinate synthase | Hypothetical protein [Bacillus licheniformis DSM 13] | UniRef100_Q65F34 | Bacillus licheniformis DSM 13 |
| 3992 | yvrA putative iron transport system ATP-binding | YvrA [Bacillus licheniformis DSM 13] | UniRef100_Q65F33 | Bacillus licheniformis DSM 13 |
| | protein YvrA | | | |
| 3993 | yvrB putative iron transport system permease protein | YvrB [Bacillus licheniformis DSM 13] | UniRef100_Q65F32 | Bacillus licheniformis DSM 13 |
| | YvrB | | | |
| 3994 | yvrC putative iron transport system substrate-binding | YvrC [Bacillus licheniformis DSM 13] | UniRef100_Q65F31 | Bacillus licheniformis DSM 13 |
| | protein YvrC | | | |
| 3995 | BLP03822 putative transcriptional regulator | Hypothetical protein [Bacillus licheniformis DSM 13] | UniRef100_Q65F30 | Bacillus licheniformis DSM 13 |
| 3996 | yvrD Short-chain dehydrogenase_reductase YvrD | YvrD [Bacillus licheniformis DSM 13] | UniRef100_Q65F29 | Bacillus licheniformis DSM 13 |
| 3997 | BLP03824 conserved hypothetical protein | Hypothetical protein [Bacillus licheniformis DSM 13] | UniRef100_Q65F28 | Bacillus licheniformis DSM 13 |
| 3998 | alsRA transcriptional regulator | Hypothetical protein [Bacillus licheniformis DSM 13] | UniRef100_Q65F27 | Bacillus licheniformis DSM 13 |
| 3999 | BLP03826 Glycoside Hydrolase Family 28 | Hypothetical protein [Bacillus licheniformis DSM 13] | UniRef100_Q65F26 | Bacillus licheniformis DSM 13 |
| 4000 | uxaA altronate hydrolase | UxaA [Bacillus licheniformis DSM 13] | UniRef100_Q65F25 | Bacillus licheniformis DSM 13 |
| 4001 | uxaB tagaturonate reductase (altronate | UxaB [Bacillus licheniformis DSM 13] | UniRef100_Q65F24 | Bacillus licheniformis DSM 13 |
| | oxidoreductase) | | | |
| 4002 | exuR transcriptional regulator | ExuR [Bacillus licheniformis DSM 13] | UniRef100_Q65F23 | Bacillus licheniformis DSM 13 |
| 4003 | BLP03830 putative Sodium:galactoside symporter | YjmB [Bacillus licheniformis DSM 13] | UniRef100_Q65F22 | Bacillus licheniformis DSM 13 |
| 4004 | uxaC glucuronate isomerase | UxaC [Bacillus licheniformis DSM 13] | UniRef100_Q65F21 | Bacillus licheniformis DSM 13 |
| 4005 | yvrG two-component sensor histidine kinase. | YvrG [Bacillus licheniformis DSM 13] | UniRef100_Q65F20 | Bacillus licheniformis DSM 13 |
| 4006 | yvrH two-component response regulator YvrH | YvrH [Bacillus licheniformis DSM 13] | UniRef100_Q65F19 | Bacillus licheniformis DSM 13 |
| 4007 | fhuC ferrichrome ABC transporter (ATP-binding | FhuC [Bacillus licheniformis DSM 13] | UniRef100_Q65F18 | Bacillus licheniformis DSM 13 |
| | protein) | | | |
| 4008 | fhuG ferrichrome ABC transporter (permease) | FhuG [Bacillus licheniformis DSM 13] | UniRef100_Q65F17 | Bacillus licheniformis DSM 13 |
| 4009 | fhuB ferrichrome ABC transporter (permease) | FhuB [Bacillus licheniformis DSM 13] | UniRef100_Q65F16 | Bacillus licheniformis DSM 13 |
| 4010 | yvsH putative amino acid transporter YvsH | YvsH [Bacillus licheniformis DSM 13] | UniRef100_Q65F15 | Bacillus licheniformis DSM 13 |
| 4011 | BLP04829 hypothetical protein | Hypothetical protein [Bacillus licheniformis DSM 13] | UniRef100_Q65F13 | Bacillus licheniformis DSM 13 |
| 4012 | yvsG putative membrane-bound metal-dependent | YvsG [Bacillus licheniformis DSM 13] | UniRef100_Q65F12 | Bacillus licheniformis DSM 13 |
| | hydrolase | | | |
| 4013 | yvgJ putative sulphatase YvgJ | YvgJ [Bacillus licheniformis DSM 13] | UniRef100_Q65F11 | Bacillus licheniformis DSM 13 |
| 4014 | ycnBA putative drug antiporter(transporter) | Hypothetical protein [Bacillus licheniformis DSM 13] | UniRef100_Q65F10 | Bacillus licheniformis DSM 13 |
| 4015 | yvgN putative 2,5-diketo-D-gluconic acid reductase | YvgN [Bacillus licheniformis DSM 13] | UniRef100_Q65F09 | Bacillus licheniformis DSM 13 |
| | YvgN | | | |
| 4016 | BLP03842 conserved hypothetical protein | YdhR [Bacillus licheniformis DSM 13] | UniRef100_Q65F08 | Bacillus licheniformis DSM 13 |
| 4017 | BLP03843 hypothetical protein | | | |
| 4018 | BLP03844 hypothetical protein | | | |
| 4019 | ycbU putative Aminotransferase, class V | YcbU [Bacillus licheniformis DSM 13] | UniRef100_Q65F07 | Bacillus licheniformis DSM 13 |
| 4020 | BLP03846 conserved hypothetical protein | Hypothetical protein [Bacillus licheniformis DSM 13] | UniRef100_Q65F06 | Bacillus licheniformis DSM 13 |
| 4021 | BLP03847 putative DNA helicase | YvgS [Bacillus licheniformis DSM 13] | UniRef100_Q65F05 | Bacillus licheniformis DSM 13 |
| 4022 | yvgT conserved membrane protein YvgT | Hypothetical protein yvgT [Bacillus licheniformis DSM 13] | UniRef100_Q65F04 | Bacillus licheniformis DSM 13 |
| 4023 | BLP03849 conserved hypothetical protein | Hypothetical protein [Bacillus licheniformis DSM 13] | UniRef100_Q65F03 | Bacillus licheniformis DSM 13 |
| 4024 | BLP03850 putative GNAT family N-acetyltransferase | Hypothetical protein [Bacillus licheniformis DSM 13] | UniRef100_Q65F02 | Bacillus licheniformis DSM 13 |
| 4025 | bdbC thiol-disulfide oxidoreductase | BdbC [Bacillus licheniformis DSM 13] | UniRef100_Q65F01 | Bacillus licheniformis DSM 13 |
| 4026 | bdbD thiol-disulfide oxidoreductase | BdbD [Bacillus licheniformis DSM 13] | UniRef100_Q65F00 | Bacillus licheniformis DSM 13 |
| 4027 | yvgW Heavy metal-(Cd_Co_Hg_Pb_Zn)-translocating | YvgW (Heavy metal-(Cd/Co/Hg/Pb/Zn)-translocating P-type | UniRef100_Q65EZ9 | Bacillus licheniformis DSM 13 |
| | P-type ATPase, Heavy metal translocating P-type | ATPase, Heavy metal translocating P-type ATPase) [Bacillus | | |
| | ATPase | licheniformis DSM 13] | | |
| 4028 | BLP03854 putative Extracellular solute-binding | Hypothetical protein [Bacillus licheniformis DSM 13] | UniRef100_Q65EZ8 | Bacillus licheniformis DSM 13 |
| | protein | | | |
| 4029 | BLP03855 Binding-protein-dependent transport | Hypothetical protein [Bacillus licheniformis DSM 13] | UniRef100_Q65EZ7 | Bacillus licheniformis DSM 13 |
| | systems inner membrane component | | | |
| 4030 | BLP03856 Binding-protein-dependent transport | YurM [Bacillus licheniformis DSM 13] | UniRef100_Q65EZ6 | Bacillus licheniformis DSM 13 |
| | systems inner membrane component | | | |
| 4031 | BLP03857 putative glycoside hydrolase family 31 | Hypothetical protein [Bacillus licheniformis DSM 13] | UniRef100_Q65EZ5 | Bacillus licheniformis DSM 13 |
| 4032 | BLP03858 putative Glycoside Hydrolase Family 3 | Hypothetical protein [Bacillus licheniformis DSM 13] | UniRef100_Q65EZ4 | Bacillus licheniformis DSM 13 |
| 4033 | BLP03859 hypothetical protein | | | |
| 4034 | mntB manganese ABC transporter (ATP-binding | MntB [Bacillus licheniformis DSM 13] | UniRef100_Q65EZ3 | Bacillus licheniformis DSM 13 |
| | protein) | | | |
| 4035 | mntD manganese ABC transporter | MntD [Bacillus licheniformis DSM 13] | UniRef100_Q65EZ2 | Bacillus licheniformis DSM 13 |
| 4036 | mntA manganese transport system substrate-binding | MntA [Bacillus licheniformis DSM 13] | UniRef100_Q65EZ1 | Bacillus licheniformis DSM 13 |
| | protein | | | |
| 4037 | BLP03863 hypothetical protein | | | |
| 4038 | BLP03864 hypothetical protein | Hypothetical protein [Bacillus licheniformis DSM 13] | UniRef100_Q62QF8 | Bacillus licheniformis DSM 13 |
| 4039 | BLP03865 putative transcriptional regulator | Hypothetical protein [Bacillus licheniformis DSM 13] | UniRef100_Q65EZ0 | Bacillus licheniformis DSM 13 |
| 4040 | BLP03866 fructose-1-phosphate kinase | Hypothetical protein [Bacillus licheniformis DSM 13] | UniRef100_Q65EY9 | Bacillus licheniformis DSM 13 |
| 4041 | BLP03867 phosphotransferase system (PTS) | Hypothetical protein (Phosphotransferase system (PTS) | UniRef100_Q65EY8 | Bacillus licheniformis DSM 13 |
| | fructose-specific enzyme IIABC component | fructose-specific enzyme IIABC component) [Bacillus | | |
| | | licheniformis DSM 13] | | |
| 4042 | BLP03868 hypothetical protein | Hypothetical protein (Phosphotransferase system (PTS) | UniRef100_Q65EY7 | Bacillus licheniformis DSM 13 |
| | | fructose-specific enzyme IIABC component) [Bacillus | | |
| | | licheniformis DSM 13] | | |
| 4043 | BLP03869 fructose-1,6-bisphosphate aldolase | Hypothetical protein [Bacillus licheniformis DSM 13] | UniRef100_Q65EY6 | Bacillus licheniformis DSM 13 |
| 4044 | BLP03870 hypothetical protein | Hypothetical protein [Bacillus licheniformis DSM 13] | UniRef100_Q62QF2 | Bacillus licheniformis DSM 13 |
| 4045 | copA Cu2-exporting ATPase | Copper ion binding domain, Copper ion binding domain | UniRef100_Q62QF1 | Bacillus licheniformis DSM 13 |
| | | [Bacillus licheniformis DSM 13] | | |
| 4046 | copZ copper binding protein CopZ | YvgY [Bacillus licheniformis DSM 13] | UniRef100_Q65EY4 | Bacillus licheniformis DSM 13 |
| 4047 | yvgZ conserved hypothetical protein YvgZ | Hypothetical protein yvgZ [Bacillus licheniformis DSM 13] | UniRef100_Q65EY3 | Bacillus licheniformis DSM 13 |
| 4048 | BLP04791 hypothetical protein | | | |
| 4049 | BLP03874 putative intracellular proteinase | Hypothetical protein [Bacillus licheniformis DSM 13] | UniRef100_Q65EY2 | Bacillus licheniformis DSM 13 |
| 4050 | yulB probable transcriptional regulator YulB | YulB [Bacillus licheniformis DSM 13] | UniRef100_Q65EY1 | Bacillus licheniformis DSM 13 |
| 4051 | yulC putative Carbohydrate kinase YulC | YulC [Bacillus licheniformis DSM 13] | UniRef100_Q65EY0 | Bacillus licheniformis DSM 13 |
| 4052 | xylA putative xylose isomerase | XylA [Bacillus licheniformis DSM 13] | UniRef100_Q65EX9 | Bacillus licheniformis DSM 13 |
| 4053 | BLP03878 conserved hypothetical protein | Hypothetical protein [Bacillus licheniformis DSM 13] | UniRef100_Q65EX8 | Bacillus licheniformis DSM 13 |
| 4054 | yuxG putative oxidoreductase YuxG | YuxG [Bacillus licheniformis DSM 13] | UniRef100_Q65EX7 | Bacillus licheniformis DSM 13 |
| 4055 | BLP03880 hypothetical protein | | | |
| 4056 | BLP03881 hypothetical protein | | | |
| 4057 | yfhI putative transporter | Hypothetical protein [Bacillus licheniformis DSM 13] | UniRef100_Q65EX6 | Bacillus licheniformis DSM 13 |
| 4058 | yvmA putative transporter YvmA | Major facilitator superfamily [Bacillus licheniformis DSM 13] | UniRef100_Q620E1 | Bacillus licheniformis DSM 13 |
| 4059 | BLP03884 hypothetical protein | | | |
| 4060 | yvmC conserved hypothetical protein YvmC | Hypothetical protein yvmC [Bacillus licheniformis DSM 13] | UniRef100_Q65EX3 | Bacillus licheniformis DSM 13 |
| 4061 | cypX cytochrome P450-like enzyme CypX | CypX [Bacillus licheniformis DSM 13] | UniRef100_Q65EX2 | Bacillus licheniformis DSM 13 |
| 4062 | BLP03887 putative metallopeptidase | Hypothetical protein [Bacillus licheniformis DSM 13] | UniRef100_Q65EX1 | Bacillus licheniformis DSM 13 |
| 4063 | yvnA probable transcriptional regulator YvnA | YvnA [Bacillus licheniformis DSM 13] | UniRef100_Q65EX0 | Bacillus licheniformis DSM 13 |
| 4064 | BLP03889 conserved hypothetical protein similar to | Hypothetical protein [Bacillus licheniformis DSM 13] | UniRef100_Q65EW9 | Bacillus licheniformis DSM 13 |
| | GatA | | | |
| 4065 | yvaA putative oxidoreductase | YvaA [Bacillus licheniformis DSM 13] | UniRef100_Q65EW7 | Bacillus licheniformis DSM 13 |
| 4066 | yvaB putative NAD(P)H dehydrogenase YvaB | YvaB (NAD(P)H dehydrogenase) [Bacillus licheniformis DSM | UniRef100_Q65EW6 | Bacillus licheniformis DSM 13 |
| | | 13] | | |
| 4067 | ybfQ conserved hypothetical protein with rhodanese | YbfQ [Bacillus licheniformis DSM 13] | UniRef100_Q65EW5 | Bacillus licheniformis DSM 13 |
| | domain | | | |
| 4068 | BLP03893 hypothetical protein | | | |
| 4069 | BLP03894 putative two-component response | Hypothetical protein yvrHA [Bacillus licheniformis DSM 13] | UniRef100_Q65EW4 | Bacillus licheniformis DSM 13 |
| | regulator | | | |
| 4070 | yvrI YvrI | YvrI [Bacillus licheniformis DSM 13] | UniRef100_Q65EW3 | Bacillus licheniformis DSM 13 |
| 4071 | BLP03896 hypothetical protein | Hypothetical protein [Bacillus licheniformis DSM 13] | UniRef100_Q65EW2 | Bacillus licheniformis DSM 13 |
| 4072 | oxdC oxalate decarboxylase | OxdC [Bacillus licheniformis DSM 13] | UniRef100_Q65EW1 | Bacillus licheniformis DSM 13 |
| 4073 | yvrL putative endo-peptidase YvrL | Hypothetical protein [Bacillus licheniformis DSM 13] | UniRef100_Q65EW0 | Bacillus licheniformis DSM 13 |
| 4074 | BLP03899 conserved hypothetical protein | Hypothetical protein [Bacillus licheniformis DSM 13] | UniRef100_Q65EV9 | Bacillus licheniformis DSM 13 |
| 4075 | BLP03900 conserved hypothetical | Hypothetical protein [Bacillus licheniformis DSM 13] | UniRef100_Q65EV8 | Bacillus licheniformis DSM 13 |
| 4076 | BLP03901 hypothetical protein | | | |
| 4077 | BLP03902 hypothetical protein | Hypothetical protein ycxB [Bacillus subtilis] | UniRef100_Q08793 | Bacillus subtilis |
| 4078 | BLP03903 hypothetical protein | | | |
| 4079 | BLP03904 hypothetical protein | Hypothetical protein [Bacillus licheniformis DSM 13] | UniRef100_Q65EU5 | Bacillus licheniformis DSM 13 |
| 4080 | BLP03905 hypothetical protein | Hypothetical protein [Bacillus licheniformis DSM 13] | UniRef100_Q65EU5 | Bacillus licheniformis DSM 13 |
| 4081 | BLP03906 conserved hypothetical putative ATP | | | |
| | binding protein | | | |
| 4082 | BLP03907 hypothetical protein | | | |
| 4083 | BLP03908 N-acetylmuramoyl-L-alanine amidase | N-acetylmuramoyl-L-alanine amidase cwlL precursor [Bacillus | UniRef100_P36550 | Bacillus licheniformis |
| | | licheniformis] | | |
| 4084 | BLP03909 partial transposase | Hypothetical protein [Bacillus licheniformis DSM 13] | UniRef100_Q65EU5 | Bacillus licheniformis DSM 13 |
| 4085 | BLP03911 conserved hypothetical | Lmo0142 protein [Listeria monocytogenes] | UniRef100_Q8YAI4 | Listena monocytogenes |
| 4086 | BLP03912 hypothetical protein | | | |
| 4087 | smpB tmRNA-binding protein | SmpB [Bacillus licheniformis DSM 13] | UniRef100_Q65EQ3 | Bacillus licheniformis DSM 13 |
| 4088 | mr ribonuclease R | Rnr [Bacillus licheniformis DSM 13] | UniRef100_Q65EQ2 | Bacillus licheniformis DSM 13 |
| 4089 | yvaK Esterase_lipase_thioesterase | YvaK [Bacillus licheniformis DSM 13] | UniRef100_Q65EQ1 | Bacillus licheniformis DSM 13 |
| 4090 | BLP03916 hypothetical protein | | | |
| 4091 | secG preprotein translocase subunit | SecG [Bacillus licheniformis DSM 13] | UniRef100_Q65EQ0 | Bacillus licheniformis DSM 13 |
| 4092 | abhA transcriptional regulator | Hypothetical protein [Bacillus licheniformis DSM 13] | UniRef100_Q65EP9 | Bacillus licheniformis DSM 13 |
| 4093 | yvzC posible transcriptional regulator | YvzC [Bacillus licheniformis DSM 13] | UniRef100_Q65EP8 | Bacillus licheniformis DSM 13 |
| 4094 | yvaO posible transcriptional regulator | Lambda repressor-like, DNA-binding [Bacillus licheniformis | UniRef100_Q62Q60 | Bacillus licheniformis DSM 13 |
| | | DSM 13] | | |
| 4095 | yvaOA possible transcriptional regulator | Hypothetical protein [Bacillus licheniformis DSM 13] | UniRef100_Q65EP6 | Bacillus licheniformis DSM 13 |
| 4096 | opuCD glycine betaine_carnitine_choline ABC | OpuCD [Bacillus licheniformis DSM 13] | UniRef100_Q65EP5 | Bacillus licheniformis DSM 13 |
| | transporter (membrane protein) | | | |
| 4097 | opuCC glycine betaine_carnitine_choline ABC | OpuCC [Bacillus licheniformis DSM 13] | UniRef100_Q65EP4 | Bacillus licheniformis DSM 13 |
| | transporter (osmoprotectant-binding protein) | | | |
| 4098 | opuCB glycine betaine_carnitine_choline ABC | OpuCB [Bacillus licheniformis DSM 13] | UniRef100_Q65EP3 | Bacillus licheniformis DSM 13 |
| | transporter (membrane protein) | | | |
| 4099 | opuCA ABC transporter | OpuCA [Bacillus licheniformis DSM 13] | UniRef100_Q65EP2 | Bacillus licheniformis DSM 13 |
| 4100 | yvbF conserved protein YvbF | YvbF [Bacillus licheniformis DSM 13] | UniRef100_Q65EP1 | Bacillus lichenifomils DSM 13 |
| 4101 | yvbG conserved membrane protein YvbG | YvbG [Bacillus licheniformis DSM 13] | UniRef100_Q65EP0 | Bacillus licheniformis DSM 13 |
| 4102 | yvbI YvbI | YvbI [Bacillus licheniformis DSM 13] | UniRef100_Q65EN9 | Bacillus licheniformis DSM 13 |
| 4103 | yvbJ hypothetical protein | YvbJ2 [Bacillus licheniformis DSM 13] | UniRef100_Q65EN7 | Bacillus licheniformis DSM 13 |
| 4104 | BLP03930 Periplasmic binding protein, putative iron | Hypothetical protein [Bacillus licheniformis DSM 13] | UniRef100_Q65EN6 | Bacillus licheniformis DSM 13 |
| | transporter | | | |
| 4105 | BLP03931 hypothetical protein | Hypothetical protein [Bacillus licheniformis DSM 13] | UniRef100_Q65EN5 | Bacillus licheniformis DSM 13 |
| 4106 | BLP03932 hypothetical protein | | | |
| 4107 | BLP03933 conserved hypothetical protein | YoaZ [Bacillus subtilis] | UniRef100_Q34947 | Bacillus subtilis |
| 4108 | eno enolase | Eno [Bacillus licheniformis DSM 13] | UniRef100_Q65EN2 | Bacillus licheniformis DSM 13 |
| 4109 | pgm phosphoglycerate mutase | Pgm [Bacillus licheniformis DSM 13] | UniRef100_Q65EN1 | Bacillus licheniformis DSM 13 |
| 4110 | tpiA triose phosphate isomerase | TpiA [Bacillus licheniformis DSM 13] | UniRef100_Q65EN0 | Bacillus licheniformis DSM 13 |
| 4111 | pgk phosphoglycerate kinase | Pgk [Bacillus licheniformis DSM 13] | UniRef100_Q65EM9 | Bacillus licheniformis DSM 13 |
| 4112 | BLP04792 hypothetical protein | | | |
| 4113 | gapA glyceraldehyde-3-phosphate dehydrogenase | GapA [Bacillus licheniformis DSM 13] | UniRef100_Q65EM8 | Bacillus licheniformis DSM 13 |
| 4114 | cggR transcriptional regulator | CggR [Bacillus licheniformis DSM 13] | UniRef100_Q65EM7 | Bacillus licheniformis DSM 13 |
| 4115 | yvbT putative oxygenase YvbT | YvbT2 [Bacillus licheniformis DSM 13] | UniRef100_Q65EM6 | Bacillus licheniformis DSM 13 |
| 4116 | yvbW putative Amino acid permease YvbW | YvbW [Bacillus licheniformis DSM 13] | UniRef100_Q65EM5 | Bacillus licheniformis DSM 13 |
| 4117 | BLP03942 hypothetical protein | | | |
| 4118 | BLP03943 hypothetical protein | Hypothetical protein [Bacillus licheniformis DSM 13] | UniRef100_Q65EM4 | Bacillus licheniformis DSM 13 |
| 4119 | BLP03944 putative ABC transporter | Hypothetical protein [Bacillus licheniformis DSM 13] | UniRef100_Q65EM3 | Bacillus licheniformis DSM 13 |
| 4120 | BLP03945 hypothetical protein | Hypothetical protein [Bacillus licheniformis DSM 13] | UniRef100_Q65EM2 | Bacillus licheniformis DSM 13 |
| 4121 | yvbY YvbY | Hypothetical protein yvbY [Bacillus licheniformis DSM 13] | UniRef100_Q65EM1 | Bacillus licheniformis DSM 13 |
| 4122 | yvfW Iron-sulfur cluster binding protein YvfW | YvfW [Bacillus licheniformis DSM 13] | UniRef100_Q65EM0 | Bacillus licheniformis DSM 13 |
| 4123 | yvfV YvfV | YvfV [Bacillus licheniformis DSM 13] | UniRef100_Q65EL9 | Bacillus licheniformis DSM 13 |
| 4124 | yvfI probable transcriptional regulator YvfI | YvfI [Bacillus licheniformis DSM 13] | UniRef100_Q65EL8 | Bacillus licheniformis DSM 13 |
| 4125 | yvfH putative L-lactate permease YvfH | YvfH [Bacillus licheniformis DSM 13] | UniRef100_Q65EL7 | Bacillus licheniformis DSM 13 |
| 4126 | sigL RNA polymerase sigma-54 factor (sigma-L) | SigL [Bacillus licheniformis DSM 13] | UniRef100_Q65EL6 | Bacillus licheniformis DSM 13 |
| 4127 | yvfG YvfG | Hypothetical protein yvfG [Bacillus licheniformis DSM 13] | UniRef100_Q65EL5 | Bacillus licheniformis DSM 13 |
| 4128 | yvfF Polysaccharide pyruvyl transferase YvfF | YvfF [Bacillus licheniformis DSM 13] | UniRef100_Q65EL4 | Bacillus licheniformis DSM 13 |
| 4129 | yvfE putative polysaccharide biosynthesis protein | YvfE [Bacillus licheniformis DSM 13] | UniRef100_Q65EL3 | Bacillus licheniformis DSM 13 |
| | YvfE | | | |
| 4130 | yvfD acetyltransferase, possible polysaccharide | YvfD [Bacillus licheniformis DSM 13] | UniRef100_Q65EL2 | Bacillus licheniformis DSM 13 |
| | biosynthesis protein YvfD | | | |
| 4131 | yvfC putative sugar transferase YvfC | YvfC [Bacillus licheniformis DSM 13] | UniRef100_Q65EL1 | Bacillus licheniformis DSM 13 |
| 4132 | yvfA YvfA | Hypothetical protein [Bacillus licheniformis DSM 13] | UniRef100_Q65EL0 | Bacillus licheniformis DSM 13 |
| 4133 | yveT putative capsular polysaccharide biosynthesis | YveT [Bacillus licheniformis DSM 13] | UniRef100_Q65EK9 | Bacillus licheniformis DSM 13 |
| | protein, Glycosyl Transferase Family 2, YveT | | | |
| 4134 | yveS putative Polysaccharide pyruvyl transferase | YveS [Bacillus licheniformis DSM 13] | UniRef100_Q65EK8 | Bacillus licheniformis DSM 13 |
| | YveS | | | |
| 4135 | yveR polysaccharide biosynthesis protein, Glycosyl | YveR [Bacillus licheniformis DSM 13] | UniRef100_Q65EK7 | Bacillus licheniformis DSM 13 |
| | transferase Family 2, YveR | | | |
| 4136 | yveQ putative capsular polysaccharide biosynthesis | Hypothetical protein yveQ [Bacillus licheniformis DSM 13] | UniRef100_Q65EK6 | Bacillus licheniformis DSM 13 |
| | protein YveQ | | | |
| 4137 | yveP putative capsular polysaccharide biosynthesis | YveP [Bacillus licheniformis DSM 13] | UniRef100_Q65EK5 | Bacillus licheniformis DSM 13 |
| | protein, Glycosyl Transferase Family 4, YveP | | | |
| 4138 | yveO putative exopolysaccharide biosynthesis | Putative glucosyl transferase [Bacillus licheniformis] | UniRef100_Q65EK4 | Bacillus licheniformis |
| | protein, Glycosyl Transferase Family 2, YveO | | | |
| 4139 | yveN putative capsular polysaccharide biosynthesis | YveN [Bacillus licheniformis DSM 13] | UniRef100_Q65EK3 | Bacillus licheniformis DSM 13 |
| | protein, Glycosyl transferase Family 4, YveN | | | |
| 4140 | yveM putative capsular polysaccharide biosynthesis | YveM [Bacillus licheniformis DSM 13] | UniRef100_Q65EK2 | Bacillus licheniformis DSM 13 |
| | protein YveM | | | |
| 4141 | yveL putative capsular polysaccharide biosynthesis | YveL [Bacillus licheniformis DSM 13] | UniRef100_Q65EK1 | Bacillus licheniformis DSM 13 |
| | protein YveL | | | |
| 4142 | yveK putative capsular polysaccharide biosynthesis | YveK [Bacillus licheniformis DSM 13] | UniRef100_Q65EK0 | Bacillus licheniformis DSM 13 |
| | protein YveK | | | |
| 4143 | slr transcriptional regulator Slr | Slr [Bacillus licheniformis DSM 13] | UniRef100_Q65EJ9 | Bacillus licheniformis DSM 13 |
| 4144 | BLP03969 hypothetical protein | | | |
| 4145 | BLP03970 hypothetical protein | | | |
| 4146 | ywrO NAD(P)H dehydrogenase YwrO | NAD(P)H-FMN oxidoreductase [Bacillus subtilis] | UniRef100_Q75V96 | Bacillus subtilis |
| 4147 | BLP03972 putative transporter | Hypothetical protein [Bacillus licheniformis DSM 13] | UniRef100_Q65EJ7 | Bacillus licheniformis DSM 13 |
| 4148 | BLP03973 hypothetical protein | Hypothetical protein [Bacillus licheniformis DSM 13] | UniRef100_Q65EJ6 | Bacillus licheniformis DSM 13 |
| 4149 | BLP03974 putative 4-hydroxythreonine-4-phosphate | Hypothetical protein [Bacillus licheniformis DSM 13] | UniRef100_Q65EJ5 | Bacillus licheniformis DSM 13 |
| | dehydrogenase | | | |
| 4150 | BLP03975 conserved hypothetical protein | Hypothetical protein [Bacillus licheniformis DSM 13] | UniRef100_Q65EJ4 | Bacillus licheniformis DSM 13 |
| 4151 | BLP03976 putative alcohol dehydrogenase | Hypothetical protein [Bacillus licheniformis DSM 13] | UniRef100_Q65EJ3 | Bacillus licheniformis DSM 13 |
| 4152 | BLP03977 putative dihydrodipicolinate synthase | Hypothetical protein [Bacillus licheniformis DSM 13] | UniRef100_Q65EJ2 | Bacillus licheniformis DSM 13 |
| 4153 | BLP03978 putative transcriptional regulator | Hypothetical protein [Bacillus licheniformis DSM 13] | UniRef100_Q65EJ1 | Bacillus licheniformis DSM 13 |
| 4154 | BLP03979 hypothetical protein | Hypothetical protein [Bacillus licheniformis DSM 13] | UniRef100_Q65EJ0 | Bacillus licheniformis DSM 13 |
| 4155 | yqiG putative NADH-dependent flavin oxidoreductase | YqiG [Bacillus licheniformis DSM 13] | UniRef100_Q65EI9 | Bacillus licheniformis DSM 13 |
| | YqiG | | | |
| 4156 | sacB levansucrase, Glycoside Hydrolase Family 68 | SacB [Bacillus licheniformis DSM 13] | UniRef100_Q65EI8 | Bacillus licheniformis DSM 13 |
| 4157 | levB endolevanase, Glycoside Hydrolase Family 32 | YveB [Bacillus licheniformis DSM 13] | UniRef100_Q65EI7 | Bacillus licheniformis DSM 13 |
| 4158 | BLP03983 hypothetical protein | | | |
| 4159 | BLP03984 hypothetical phage tail like protein | ORF36 [Bacteriophage phi-105] | UniRef100_Q9ZXE7 | Bacteriophage phi-105 |
| 4160 | BLP04906 hypothetical protein | UPI000024ED56 UniRef100 entry | UniRef100_UPI000024ED56 | |
| 4161 | BLP03985 conserved hypothetical | Hypothetical protein MW1895 [Staphylococcus aureus] | UniRef100_Q8NVQ7 | Staphylococcus aureus |
| 4162 | BLP03986 hypothetical protein | | | |
| 4163 | BLP03987 hypothetical protein | | | |
| 4164 | BLP03988 hypothetical protein | | | |
| 4165 | BLP04793 hypothetical protein | | | |
| 4166 | BLP03989 hypothetical protein | | | |
| 4167 | BLP03990 hypothetical protein | | | |
| 4168 | BLP03991 hypothetical protein | | | |
| 4169 | BLP03992 hypothetical protein | | | |
| 4170 | BLP04907 hypothetical protein | | | |
| 4171 | BLP03993 hypothetical protein | | | |
| 4172 | BLP04794 hypothetical protein | | | |
| 4173 | BLP03994 hypothetical protein | | | |
| 4174 | BLP04908 conserved hypothetical protein | Phage protein [Bacillus cereus] | UniRef100_Q81EQ2 | Bacillus cereus |
| 4175 | BLP03995 hypothetical protein | | | |
| 4176 | BLP03996 hypothetical protein | Hypothetical protein [Bacillus licheniformis DSM 13] | UniRef100_Q65KH7 | Bacillus licheniformis DSM 13 |
| 4177 | BLP03997 hypothetical protein | Hypothetical protein [Bacillus licheniformis DSM 13] | UniRef100_Q65KD0 | Bacillus licheniformis DSM 13 |
| 4178 | BLP03998 hypothetical protein | Hypothetical protein [Bacillus licheniformis DSM 13] | UniRef100_Q65KH8 | Bacillus licheniformis DSM 13 |
| 4179 | BLP03999 putative recombinase_integrase | UPI00003CC585 UniRef100 entry | UniRef100_UPI00003CC585 | |
| 4180 | BLP04000 putative phage related protein | Hypothetical protein yolD [Bacillus licheniformis DSM 13] | UniRef100_Q65KE1 | Bacillus licheniformis DSM 13 |
| 4181 | BLP04001 hypothetical protein | Hypothetical protein [Bacillus licheniformis DSM 13] | UniRef100_Q65KE2 | Bacillus licheniformis DSM 13 |
| 4182 | BLP04002 putative integrase | Hypothetical protein [Bacillus licheniformis DSM 13] | UniRef100_Q65KI2 | Bacillus licheniformis DSM 13 |
| 4183 | BLP04003 hypothetical protein | Hypothetical protein [Bacillus licheniformis DSM 13] | UniRef100_Q65EI6 | Bacillus licheniformis DSM 13 |
| 4184 | clpP ATP-dependent Clp protease proteolytic subunit | ClpP [Bacillus licheniformis DSM 13] | UniRef100_Q65EI5 | Bacillus licheniformis DSM 13 |
| | (class III heat-shock protein) | | | |
| 4185 | BLP04005 Conserved hypothetical protein | Hypothetical protein [Bacillus licheniformis DSM 13] | UniRef100_Q62Q01 | Bacillus licheniformis DSM 13 |
| 4186 | yvdC YvdC | YvdC [Bacillus licheniformis DSM 13] | UniRef100_Q65EI3 | Bacillus licheniformis DSM 13 |
| 4187 | BLP04007 putative Metal-dependent | YdhJ [Bacillus licheniformis DSM 13] | UniRef100_Q65EI2 | Bacillus licheniformis DSM 13 |
| | phosphohydrolase protein | | | |
| 4188 | yvdB Sulfate transporter_antisigma-factor antagonist | YvdB [Bacillus licheniformis DSM 13] | UniRef100_Q65EI1 | Bacillus licheniformis DSM 13 |
| 4189 | yvdA Carbonic anhydrase, prokaryotic YvdA | YvdA [Bacillus licheniformis DSM 13] | UniRef100_Q65EI0 | Bacillus licheniformis DSM 13 |
| 4190 | yvcT probable 2-ketogluconate reductase YvcT | YvcT [Bacillus licheniformis DSM 13] | UniRef100_Q65EH9 | Bacillus licheniformis DSM 13 |
| 4191 | ydfE conserved hypothetical protein | YdfE [Bacillus licheniformis DSM 13] | UniRef100_Q65EH8 | Bacillus licheniformis DSM 13 |
| 4192 | ydfF hypothetical protein | YdfF [Bacillus licheniformis DSM 13] | UniRef100_Q65EH7 | Bacillus licheniformis DSM 13 |
| 4193 | BLP04013 putative ribonuclease | Hypothetical protein [Bacillus licheniformis DSM 13] | UniRef100_Q65EH6 | Bacillus licheniformis DSM 13 |
| 4194 | yrdF putative ribonuclease inhibitor YrdF | YrdF [Bacillus licheniformis DSM 13] | UniRef100_Q65EH5 | Bacillus licheniformis DSM 13 |
| 4195 | nat arylamine N-acetyltransferase | YvcN [Bacillus licheniformis DSM 13] | UniRef100_Q65EH4 | Bacillus licheniformis DSM 13 |
| 4196 | crh catabolite repression protein | Crh [Bacillus licheniformis DSM 13] | UniRef100_Q65EH3 | Bacillus licheniformis DSM 13 |
| 4197 | yvcL conserved protein YvcL | Hypothetical protein yvcL [Bacillus licheniformis DSM 13] | UniRef100_Q65EH2 | Bacillus licheniformis DSM 13 |
| 4198 | yvcK Conserved hypothetical protein YvcK | YvcK [Bacillus licheniformis DSM 13] | UniRef100_Q65EH1 | Bacillus licheniformis DSM 13 |
| 4199 | yvcJ Uncharacterised P-loop ATPase protein family | YvcJ [Bacillus licheniformis DSM 13] | UniRef100_Q65EH0 | Bacillus licheniformis DSM 13 |
| | UPF0042 | | | |
| 4200 | yvcI NUDIX hydrolase | YvcI [Bacillus licheniformis DSM 13] | UniRef100_Q65EG9 | Bacillus licheniformis DSM 13 |
| 4201 | BLP04021 conserved hypothetical protein | Hypothetical protein [Bacillus licheniformis DSM 13] | UniRef100_Q65EG8 | Bacillus licheniformis DSM 13 |
| 4202 | trxB thioredoxin reductase | TrxB [Bacillus licheniformis DSM 13] | UniRef100_Q65EG7 | Bacillus licheniformis DSM 13 |
| 4203 | yvcD TPR-like, Putative DNA binding | YvcD [Bacillus licheniformis DSM 13] | UniRef100_Q65EG6 | Bacillus licheniformis DSM 13 |
| 4204 | ybbJ GCN5-related N-acetyltransferase | YbbJ [Bacillus licheniformis DSM 13] | UniRef100_Q65EG5 | Bacillus licheniformis DSM 13 |
| 4205 | hisI phosphoribosyl-AMP cyclohydrolase and | HisI [Bacillus licheniformis DSM 13] | UniRef100_Q65EG4 | Bacillus licheniformis DSM 13 |
| | phosphoribosyl-ATP pyrophosphohydrolase, Histidine | | | |
| | biosynthesis bifunctional protein HisI | | | |
| 4206 | hisF Imidazole glycerol phosphate synthase subunit | HisF cyclase-like protein [Bacillus licheniformis DSM 13] | UniRef100_Q65EG3 | Bacillus licheniformis DSM 13 |
| | HisF | | | |
| 4207 | hisA phosphoribosylformimino-5-aminoimidazole | HisA [Bacillus licheniformis DSM 13] | UniRef100_Q65EG2 | Bacillus licheniformis DSM 13 |
| | carboxamide nbotide isomerase | | | |
| 4208 | hisH Imidazole glycerol phosphate synthase subunit | HisH [Bacillus licheniformis DSM 13] | UniRef100_Q65EG1 | Bacillus licheniformis DSM 13 |
| | HisH | | | |
| 4209 | hisB imidazoleglycerol-phosphate dehydratase | HisB [Bacillus licheniformis DSM 13] | UniRef100_Q65EG0 | Bacillus licheniformis DSM 13 |
| 4210 | hisD histidinol dehydrogenase | HisD [Bacillus licheniformis DSM 13] | UniRef100_Q65EF9 | Bacillus licheniformis DSM 13 |
| 4211 | hisG ATP phosphoribosyltransferase HisG | HisG [Bacillus licheniformis DSM 13] | UniRef100_Q65EF8 | Bacillus licheniformis DSM 13 |
| 4212 | hisZ histidyl-tRNA synthetase HisZ | HisZ [Bacillus licheniformis DSM 13] | UniRef100_Q65EF7 | Bacillus licheniformis DSM 13 |
| 4213 | yvpB putative cysteine protease YvpB | Hypothetical protein [Bacillus licheniformis DSM 13] | UniRef100_Q65EF6 | Bacillus licheniformis DSM 13 |
| 4214 | pelC Polysaccharide Lyase Family 3, putative pectate | YvpA [Bacillus licheniformis DSM 13] | UniRef100_Q65EF5 | Bacillus licheniformis DSM 13 |
| | lyase | | | |
| 4215 | yvoF Trimeric LpxA-like | YvoF [Bacillus licheniformis DSM 13] | UniRef100_Q65EF4 | Bacillus licheniformis DSM 13 |
| 4216 | hprP, ppaX, ptsL, yvoE Pyrophosphatase PpaX | HprP e [Bacillus licheniformis DSM 13] | UniRef100_Q65EF3 | Bacillus licheniformis DSM 13 |
| 4217 | yvoD conserved membrane protein YvoD | Hypothetical protein yvoD [Bacillus licheniformis DSM 13] | UniRef100_Q65EF2 | Bacillus licheniformis DSM 13 |
| 4218 | lgt prolipoprotein diacylglyceryl transferase | Lgt [Bacillus licheniformis DSM 13] | UniRef100_Q65EF1 | Bacillus licheniformis DSM 13 |
| 4219 | hprK serine_threonine protein kinase | HprK [Bacillus licheniformis DSM 13] | UniRef100_Q65EF0 | Bacillus licheniformis DSM 13 |
| 4220 | yfiV putative transcriptional regulator YfiV | YfiV [Bacillus licheniformis DSM 13] | UniRef100_Q65EE9 | Bacillus licheniformis DSM 13 |
| 4221 | BLP04041 hypothetical protein | | | |
| 4222 | yfiU putative multidrug-efflux transporter YfiU | YfiU [Bacillus licheniformis DSM 13] | UniRef100_Q65EE8 | Bacillus licheniformis DSM 13 |
| 4223 | yvnB YvnB | YvnB [Bacillus licheniformis DSM 13] | UniRef100_Q65EE7 | Bacillus licheniformis DSM 13 |
| 4224 | yvlD conserved membrane protein YvlD | Hypothetical protein yvlD [Bacillus licheniformis DSM 13] | UniRef100_Q65EE6 | Bacillus licheniformis DSM 13 |
| 4225 | yvlC PspC | YvlC [Bacillus licheniformis DSM 13] | UniRef100_Q65EE5 | Bacillus licheniformis DSM 13 |
| 4226 | yvlB conserved hypothetical protein YvlB | Hypothetical protein yvlB [Bacillus licheniformis DSM 13] | UniRef100_Q65EE4 | Bacillus licheniformis DSM 13 |
| 4227 | yvlA YvlA | Hypothetical protein yvlA [Bacillus licheniformis DSM 13] | UniRef100_Q65EE3 | Bacillus licheniformis DSM 13 |
| 4228 | yvkN YvkN | Hypothetical protein yvkN [Bacillus licheniformis DSM 13] | UniRef100_Q65EE2 | Bacillus licheniformis DSM 13 |
| 4229 | BLP04049 putative dioxygenase protein | Hypothetical protein [Bacillus licheniformis DSM 13] | UniRef100_Q65EE0 | Bacillus licheniformis DSM 13 |
| 4230 | uvrA excinuclease ABC (subunit A) | UvrA2 [Bacillus licheniformis DSM 13] | UniRef100_Q65ED9 | Bacillus licheniformis DSM 13 |
| 4231 | uvrB excinuclease ABC (subunit B) | UvrB [Bacillus licheniformis DSM 13] | UniRef100_Q65ED8 | Bacillus licheniformis DSM 13 |
| 4232 | csbA putative membrane protein | CsbA [Bacillus licheniformis DSM 13] | UniRef100_Q65ED7 | Bacillus licheniformis DSM 13 |
| 4233 | BLP04054 conserved hypothetical protein | YwkF [Bacillus licheniformis DSM 13] | UniRef100_Q65ED6 | Bacillus licheniformis DSM 13 |
| 4234 | swrAB motility_swarming protein SwrAB | YvjD [Bacillus licheniformis DSM 13] | UniRef100_Q65ED5 | Bacillus licheniformis DSM 13 |
| 4235 | BLP04056 hypothetical protein | | | |
| 4236 | swrA Swarming motility protein SwrA | Hypothetical protein yvzD [Bacillus licheniformis DSM 13] | UniRef100_Q62PV3 | Bacillus licheniformis DSM 13 |
| 4237 | ctpB Peptidase S41A, C-terminal protease | YvjB [Bacillus licheniformis DSM 13] | UniRef100_Q65ED3 | Bacillus licheniformis DSM 13 |
| 4238 | ycsA putative dehydrogenase | Isocitrate/isopropylmalate dehydrogenase [Bacillus | UniRef100_Q62PV1 | Bacillus licheniformis DSM 13 |
| | | licheniformis DSM 13] | | |
| 4239 | BLP04060 hypothetical protein | | | |
| 4240 | BLP04061 conserved hypothetical protein, putative | Hypothetical protein [Bacillus licheniformis DSM 13] | UniRef100_Q65ED1 | Bacillus licheniformis DSM 13 |
| | peptidase | | | |
| 4241 | ftsX Cell division ABC transporter, permease protein | FtsX [Bacillus licheniformis DSM 13] | UniRef100_Q65ED0 | Bacillus licheniformis DSM 13 |
| | FtsX | | | |
| 4242 | ftsE cell-division ATP-binding protein | FtsE [Bacillus licheniformis DSM 13] | UniRef100_Q65EC9 | Bacillus licheniformis DSM 13 |
| 4243 | BLP04064 hypothetical protein | | | |
| 4244 | cccB putative cytochrome c551 heme binding protein | CccB [Bacillus licheniformis DSM 13] | UniRef100_Q65EC8 | Bacillus licheniformis DSM 13 |
| 4245 | yvjA conserved membrane protein YvjA | Hypothetical protein yvjA [Bacillus licheniformis DSM 13] | UniRef100_Q65EC7 | Bacillus licheniformis DSM 13 |
| 4246 | prfB peptide chain release factor 2 | PrfB [Bacillus licheniformis DSM 13] | UniRef100_Q65EC6 | Bacillus licheniformis DSM 13 |
| 4247 | secA translocase binding subunit (ATPase) | SecA [Bacillus licheniformis DSM 13] | UniRef100_Q65EC5 | Bacillus licheniformis DSM 13 |
| 4248 | yvyD general stress protein conserved hypothetical | Sigma 54 modulation protein/ribosomal protein S30EA | UniRef100_Q62PU3 | Bacillus licheniformis DSM 13 |
| | YvyD | [Bacillus licheniformis DSM 13] | | |
| 4249 | BLP04070 hypothetical protein | Hypothetical protein [Bacillus licheniformis DSM 13] | UniRef100_Q65EC3 | Bacillus licheniformis DSM 13 |
| 4250 | fliT flagellar protein FliT | FliT [Bacillus licheniformis DSM 13] | UniRef100_Q65EC2 | Bacillus licheniformis DSM 13 |
| 4251 | fliS flagellar protein FliS | FliS [Bacillus licheniformis DSM 13] | UniRef100_Q65EC1 | Bacillus licheniformis DSM 13 |
| 4252 | fliD flagellar hook-associated protein FliD | FliD [Bacillus licheniformis DSM 13] | UniRef100_Q65EC0 | Bacillus licheniformis DSM 13 |
| 4253 | yvyC Flagellar protein YvyC | YvyC [Bacillus licheniformis DSM 13] | UniRef100_Q65EB9 | Bacillus licheniformis DSM 13 |
| 4254 | hag flagellin protein Hag | Hag [Bacillus licheniformis DSM 13] | UniRef100_Q65EB8 | Bacillus licheniformis DSM 13 |
| 4255 | csrA carbon storage regulator CsrA | CsrA [Bacillus licheniformis DSM 13] | UniRef100_Q65EB7 | Bacillus licheniformis DSM 13 |
| 4256 | yviF conserved membrane protein YviF | YviF [Bacillus licheniformis DSM 13] | UniRef100_Q65EB6 | Bacillus licheniformis DSM 13 |
| 4257 | yviE conserved protein YviE | Hypothetical protein yviE [Bacillus licheniformis DSM 13] | UniRef100_Q65EB5 | Bacillus licheniformis DSM 13 |
| 4258 | flgL flagellar hook-associated protein 3 | FlgL [Bacillus licheniformis DSM 13] | UniRef100_Q65EB4 | Bacillus licheniformis DSM 13 |
| 4259 | flgK flagellar hook-associated protein 1 | FlgK [Bacillus licheniformis DSM 13] | UniRef100_Q65EB3 | Bacillus licheniformis DSM 13 |
| 4260 | yvyG flagellar protein YvyG | Hypothetical protein yvyG [Bacillus licheniformis DSM 13] | UniRef100_Q65EB2 | Bacillus licheniformis DSM 13 |
| 4261 | flgM anti-sigma factor repressor of sigma-D- | FlgM [Bacillus licheniformis DSM 13] | UniRef100_Q65EB1 | Bacillus licheniformis DSM 13 |
| | dependent transcription | | | |
| 4262 | yvyF flagellar protein YvyF | Hypothetical protein yvyF [Bacillus licheniformis DSM 13] | UniRef100_Q65EB0 | Bacillus licheniformis DSM 13 |
| 4263 | comFC late competence protein ComFC | Hypothetical protein comFC [Bacillus licheniformis DSM 13] | UniRef100_Q65EA9 | Bacillus licheniformis DSM 13 |
| 4264 | comFB late competence protein ComFB | Hypothetical protein comFB [Bacillus licheniformis DSM 13] | UniRef100_Q65EA8 | Bacillus licheniformis DSM 13 |
| 4265 | comFA late competence protein | Late competence protein ComFA [Bacillus licheniformis] | UniRef100_Q8VQ58 | Bacillus licheniformis |
| 4266 | degV DegV | Hypothetical protein yviA [Bacillus licheniformis] | UniRef100_Q8VQ59 | Bacillus licheniformis |
| 4267 | degU two-component response regulator | DegU [Bacillus licheniformis DSM 13] | UniRef100_Q65EA5 | Bacillus licheniformis DSM 13 |
| 4268 | degS two-component sensor histidine kinase | DegS [Bacillus licheniformis DSM 13] | UniRef100_Q65EA4 | Bacillus licheniformis DSM 13 |
| 4269 | yvyE YvyE | Hypothetical protein yvyE [Bacillus licheniformis DSM 13] | UniRef100_Q65EA3 | Bacillus licheniformis DSM 13 |
| 4270 | yvhJ putative transcriptional attenuator LytR family | YvhJ [Bacillus licheniformis DSM 13] | UniRef100_Q65EA2 | Bacillus licheniformis DSM 13 |
| | protein | | | |
| 4271 | yunG YunG | Hypothetical protein yunG [Bacillus licheniformis DSM 13] | UniRef100_Q65EA1 | Bacillus licheniformis DSM 13 |
| 4272 | tagO TagO | Hypothetical protein tagO [Bacillus licheniformis DSM 13] | UniRef100_Q65EA0 | Bacillus licheniformis DSM 13 |
| 4273 | tuaH Glycosyl Transferase Family4, TuaH | Hypothetical protein tuaH [Bacillus licheniformis DSM 13] | UniRef100_Q65E99 | Bacillus licheniformis DSM 13 |
| 4274 | tuaG Glycosyl Transferase Family 2, TuaG | TuaG [Bacillus licheniformis DSM 13] | UniRef100_Q65E98 | Bacillus licheniformis DSM 13 |
| 4275 | tuaF TuaF | Hypothetical protein tuaF [Bacillus licheniformis DSM 13] | UniRef100_Q65E97 | Bacillus licheniformis DSM 13 |
| 4276 | tuaE TuaE | Hypothetical protein tuaE [Bacillus licheniformis DSM 13] | UniRef100_Q65E96 | Bacillus licheniformis DSM 13 |
| 4277 | BLP04098 UDP-glucose 4-epimerase | Hypothetical protein [Bacillus licheniformis DSM 13] | UniRef100_Q65E95 | Bacillus licheniformis DSM 13 |
| 4278 | tuaD UDP-glucose 6-dehydrogenase TuaD | TuaD [Bacillus licheniformis DSM 13] | UniRef100_Q65E94 | Bacillus licheniformis DSM 13 |
| 4279 | tuaC glycosyl transferase Family 4, TuaC | Hypothetical protein tuaC [Bacillus licheniformis DSM 13] | UniRef100_Q65E93 | Bacillus licheniformis DSM 13 |
| 4280 | tuaB TuaB | Hypothetical protein tuaB [Bacillus licheniformis DSM 13] | UniRef100_Q65E92 | Bacillus licheniformis DSM 13 |
| 4281 | tuaA TuaA | Hypothetical protein tuaA [Bacillus licheniformis DSM 13] | UniRef100_Q65E91 | Bacillus licheniformis DSM 13 |
| 4282 | lytC N-acetylmuramoyl-L-alanine amidase (major | LytC [Bacillus licheniformis DSM 13] | UniRef100_Q65E90 | Bacillus licheniformis DSM 13 |
| | autolysin) (CWBP49) | | | |
| 4283 | lytB modifier protein of major autolysin LytC | LytB [Bacillus licheniformis DSM 13] | UniRef100_Q65E89 | Bacillus licheniformis DSM 13 |
| | (CWBP76) | | | |
| 4284 | BLP04105 membrane bound lipoprotein | Hypothetical protein [Bacillus licheniformis DSM 13] | UniRef100_Q65E88 | Bacillus licheniformis DSM 13 |
| 4285 | BLP04795 hypothetical protein | | | |
| 4286 | lytR membrane-bound protein | LytR [Bacillus licheniformis DSM 13] | UniRef100_Q65E87 | Bacillus licheniformis DSM 13 |
| 4287 | mnaA UDP-N-acetylglucosamine 2-epimerase | YvyH [Bacillus licheniformis DSM 13] | UniRef100_Q65E86 | Bacillus licheniformis DSM 13 |
| 4288 | BLP04108 hypothetical protein | | | |
| 4289 | gtaB UTP-glucose-1-phosphate uridylyltransferase | GtaB [Bacillus licheniformis DSM 13] | UniRef100_Q65E85 | Bacillus licheniformis DSM 13 |
| 4290 | tagH ATP-binding protein | TagH [Bacillus licheniformis DSM 13] | UniRef100_Q65E84 | Bacillus licheniformis DSM 13 |
| 4291 | tagG permease | TagG [Bacillus licheniformis DSM 13] | UniRef100_Q65E83 | Bacillus licheniformis DSM 13 |
| 4292 | tagFA Glycosyl transferase family 4 | Hypothetical protein [Bacillus licheniformis DSM 13] | UniRef100_Q65E82 | Bacillus licheniformis DSM 13 |
| 4293 | tagFB CDP-glycerol:polyglycerol phosphate glycero- | TagF [Bacillus licheniformis DSM 13] | UniRef100_Q65E81 | Bacillus licheniformis DSM 13 |
| | phosphotransferase | | | |
| 4294 | tagD glycerol-3-phosphate cytidylyltransferase | TagD [Bacillus licheniformis DSM 13] | UniRef100_Q65E80 | Bacillus licheniformis DSM 13 |
| 4295 | tagA Glycosyl Transferase Family 26 | TagA [Bacillus licheniformis DSM 13] | UniRef100_Q65E79 | Bacillus licheniformis DSM 13 |
| 4296 | tagB putative CDP-glycerol | Hypothetical protein tagB [Bacillus licheniformis DSM 13] | UniRef100_Q65E78 | Bacillus licheniformis DSM 13 |
| | glycerophosphotransferase TagB | | | |
| 4297 | lytD N-acetylglucosaminidase Glycoside Hydrolase | LytD [Bacillus licheniformis DSM 13] | UniRef100_Q65E77 | Bacillus licheniformis DSM 13 |
| | Family 73 | | | |
| 4298 | pmi mannose-6-phosphate isomerase | Pmi [Bacillus licheniformis DSM 13] | UniRef100_Q65E76 | Bacillus licheniformis DSM 13 |
| 4299 | BLP04119 iron-binding, putative oxidoreductase | Hypothetical protein [Bacillus licheniformis DSM 13] | UniRef100_Q65E75 | Bacillus licheniformis DSM 13 |
| 4300 | BLP04120 hypothetical protein | Hypothetical protein [Bacillus licheniformis DSM 13] | UniRef100_Q65E74 | Bacillus licheniformis DSM 13 |
| 4301 | kdgT 2-keto-3-deoxygluconate permease | KdgT [Bacillus licheniformis DSM 13] | UniRef100_Q65E73 | Bacillus licheniformis DSM 13 |
| 4302 | kdgA 2-keto-3-deoxygluconate-6-phosphate aldolase | 2-keto-3-deoxygluconate-6-phosphate aldolase [Bacillus | UniRef100_Q62PP2 | Bacillus licheniformis DSM 13 |
| | | licheniformis DSM 13] | | |
| 4303 | kdgK 2-keto-3-deoxygluconate kinase | KdgK [Bacillus licheniformis DSM 13] | UniRef100_Q65E71 | Bacillus licheniformis DSM 13 |
| 4304 | kdgR transcriptional regulator | KdgR [Bacillus licheniformis DSM 13] | UniRef100_Q65E70 | Bacillus licheniformis DSM 13 |
| 4305 | BLP04125 hypothetical protein | | | |
| 4306 | kdul 5-keto-4-deoxyuronate isomerase | Kdul [Bacillus licheniformis DSM 13] | UniRef100_Q65E69 | Bacillus licheniformis DSM 13 |
| 4307 | kduD 2-keto-3-deoxygluconate oxidoreductase | KduD [Bacillus licheniformis DSM 13] | UniRef100_Q65E68 | Bacillus licheniformis DSM 13 |
| 4308 | adhB alcohol dehydrogenase | AdhB [Bacillus licheniformis DSM 13] | UniRef100_Q65E67 | Bacillus licheniformis DSM 13 |
| 4309 | ywtG Sugar transporter YwtG | YwtG [Bacillus licheniformis DSM 13] | UniRef100_Q65E66 | Bacillus licheniformis DSM 13 |
| 4310 | ywtF Cell envelope-related transcriptional attenuator | YwtF [Bacillus licheniformis DSM 13] | UniRef100_Q65E65 | Bacillus licheniformis DSM 13 |
| | YwtF | | | |
| 4311 | ywtE putative hydrolase YwtE | YwtE [Bacillus licheniformis DSM 13] | UniRef100_Q65E64 | Bacillus licheniformis DSM 13 |
| 4312 | pgdS gamma-DL-glutamyl hydrolase | YwtD [Bacillus licheniformis DSM 13] | UniRef100_Q65E63 | Bacillus licheniformis DSM 13 |
| 4313 | pgsE PgsE | Hypothetical protein YwtC [Bacillus licheniformis DSM 13] | UniRef100_Q65E62 | Bacillus licheniformis DSM 13 |
| 4314 | pgsAA poly-gamma-glutamate synthesis protein | YwtB [Bacillus licheniformis DSM 13] | UniRef100_Q65E61 | Bacillus licheniformis DSM 13 |
| 4315 | pgsC poly-gamma-glutamate synthesis, Capsule | YwtA [Bacillus licheniformis DSM 13] | UniRef100_Q65E60 | Bacillus licheniformis DSM 13 |
| | biosynthesis protein | | | |
| 4316 | pgsB poly-gamma-glutamate synthesis protein | YwsC [Bacillus licheniformis DSM 13] | UniRef100_Q65E59 | Bacillus licheniformis DSM 13 |
| 4317 | rbsR transcriptional regulator (Lacl family) | RbsR [Bacillus licheniformis DSM 13] | UniRef100_Q65E58 | Bacillus licheniformis DSM 13 |
| 4318 | rbsK ribokinase | RbsK [Bacillus licheniformis DSM 13] | UniRef100_Q65E57 | Bacillus licheniformis DSM 13 |
| 4319 | rbsD ribose ABC transporter (membrane protein) | RbsD [Bacillus licheniformis DSM 13] | UniRef100_Q65E56 | Bacillus licheniformis DSM 13 |
| 4320 | rbsA ribose ABC transporter (ATP-binding protein) | RbsA [Bacillus licheniformis DSM 13] | UniRef100_Q65E55 | Bacillus licheniformis DSM 13 |
| 4321 | rbsC ribose ABC transporter (permease) | RbsC [Bacillus licheniformis DSM 13] | UniRef100_Q65E54 | Bacillus licheniformis DSM 13 |
| 4322 | rbsB ribose ABC transporter (ribose-binding protein) | RbsB [Bacillus licheniformis DSM 13] | UniRef100_Q65E53 | Bacillus licheniformis DSM 13 |
| 4323 | BLP04143 hypothetical protein | | | |
| 4324 | alsD alpha-acetolactate decarboxylase | AlsD [Bacillus licheniformis DSM 13] | UniRef100_Q65E52 | Bacillus licheniformis DSM 13 |
| 4325 | alsS alpha-acetolactate synthase (pH6) | AlsS [Bacillus licheniformis DSM 13] | UniRef100_Q65E51 | Bacillus licheniformis DSM 13 |
| 4326 | alsR transcriptional regulator (LysR family) | AlsR [Bacillus licheniformis DSM 13] | UniRef100_Q65E50 | Bacillus licheniformis DSM 13 |
| 4327 | ywrD Peptidase T3, gamma-glutamyltranspeptidase | YwrD [Bacillus licheniformis DSM 13] | UniRef100_Q65E49 | Bacillus licheniformis DSM 13 |
| 4328 | ywrC transcriptional regulator YwrC | YwrC [Bacillus licheniformis DSM 13] | UniRef100_Q65E48 | Bacillus licheniformis DSM 13 |
| 4329 | ywrB Chromate transporter YwrB | YwrB [Bacillus licheniformis DSM 13] | UniRef100_Q65E47 | Bacillus licheniformis DSM 13 |
| 4330 | ywrA Chromate transporter YwrA | YwrA [Bacillus licheniformis DSM 13] | UniRef100_Q65E46 | Bacillus licheniformis DSM 13 |
| 4331 | ywqE protein tyrosine phoshpatase | YwqE [Bacillus licheniformis DSM 13] | UniRef100_Q65E45 | Bacillus licheniformis DSM 13 |
| 4332 | ywqC Modulator of tyrosine kinase | YwqC [Bacillus licheniformis DSM 13] | UniRef100_Q65E44 | Bacillus licheniformis DSM 13 |
| 4333 | BLP04153 conserved hypothetical protein | Hypothetical protein [Bacillus licheniformis DSM 13] | UniRef100_Q65E43 | Bacillus licheniformis DSM 13 |
| 4334 | ywqB YwqB | YwqB [Bacillus licheniformis DSM 13] | UniRef100_Q65E42 | Bacillus licheniformis DSM 13 |
| 4335 | ywqA putative helicase YwqA | YwqA [Bacillus licheniformis DSM 13] | UniRef100_Q65E41 | Bacillus licheniformis DSM 13 |
| 4336 | BLP04516 conserved hypothetical protein | Hypothetical protein [Bacillus licheniformis DSM 13] | UniRef100_Q65E40 | Bacillus licheniformis DSM 13 |
| 4337 | ywpJ putative hydrolase YwpJ | YwpJ [Bacillus licheniformis DSM 13] | UniRef100_Q65E39 | Bacillus licheniformis DSM 13 |
| 4338 | glcR transcriptional regulator (DeoR family) | GlcR [Bacillus licheniformis DSM 13] | UniRef100_Q65E38 | Bacillus licheniformis DSM 13 |
| 4339 | BLP04159 putative Transaldolase | Hypothetical protein [Bacillus licheniformis DSM 13] | UniRef100_Q65E37 | Bacillus licheniformis DSM 13 |
| 4340 | BLP04160 putative oxidoreductase | Hypothetical protein [Bacillus licheniformis DSM 13] | UniRef100_Q65E36 | Bacillus licheniformis DSM 13 |
| 4341 | BLP04161 putative phosphotransferase | Hypothetical protein [Bacillus licheniformis DSM 13] | UniRef100_Q65E35 | Bacillus licheniformis DSM 13 |
| 4342 | BLP04162 putative phosphotransferase | Hypothetical protein [Bacillus licheniformis DSM 13] | UniRef100_Q65E34 | Bacillus licheniformis DSM 13 |
| 4343 | BLP04163 Phosphotransferase enzyme II | Hypothetical protein [Bacillus licheniformis DSM 13] | UniRef100_Q65E33 | Bacillus licheniformis DSM 13 |
| 4344 | BLP04164 putative transcriptional activator | Hypothetical protein [Bacillus licheniformis DSM 13] | UniRef100_Q65E32 | Bacillus licheniformis DSM 13 |
| 4345 | BLP04165 transcriptional regulator | Hypothetical protein [Bacillus licheniformis DSM 13] | UniRef100_Q65E31 | Bacillus licheniformis DSM 13 |
| 4346 | ywpH Single-strand binding protein | YwpH [Bacillus licheniformis DSM 13] | UniRef100_Q65E30 | Bacillus licheniformis DSM 13 |
| 4347 | ywpG YwpG | Hypothetical protein ywpG [Bacillus licheniformis DSM 13] | UniRef100_Q65E29 | Bacillus licheniformis DSM 13 |
| 4348 | ywpF conserved protein YwpF | Hypothetical protein ywpF [Bacillus licheniformis DSM 13] | UniRef100_Q65E28 | Bacillus licheniformis DSM 13 |
| 4349 | mscL large conductance mechanosensitive channel | MscL [Bacillus licheniformis DSM 13] | UniRef100_Q65E27 | Bacillus licheniformis DSM 13 |
| | protein | | | |
| 4350 | fabZ Beta-hydroxyacyl-(acyl-carrier-protein) | YwpB (Beta-hydroxyacyl-(Acyl-carrier-protein) dehydratase | UniRef100_Q65E26 | Bacillus licheniformis DSM 13 |
| | dehydratase FabZ | FabZ) [Bacillus licheniformis DSM 13] | | |
| 4351 | flhP flagellar hook-basal body protein | FlhP [Bacillus licheniformis DSM 13] | UniRef100_Q65E25 | Bacillus licheniformis DSM 13 |
| 4352 | flhO flagellar basal-body rod protein | FlhO [Bacillus licheniformis DSM 13] | UniRef100_Q65E24 | Bacillus licheniformis DSM 13 |
| 4353 | BLP04174 hypothetical protein | | | |
| 4354 | mbl MreB-like protein | Mbl [Bacillus licheniformis DSM 13] | UniRef100_Q65E23 | Bacillus licheniformis DSM 13 |
| 4355 | spoIIID transcriptional regulator | SpoIIID [Bacillus licheniformis DSM 13] | UniRef100_Q65E22 | Bacillus licheniformis DSM 13 |
| 4356 | usd Usd | Hypothetical protein usd [Bacillus licheniformis DSM 13] | UniRef100_Q62PJ3 | Bacillus licheniformis DSM 13 |
| 4357 | ywoH putative transcriptional regulator (MarR family) | YwoH [Bacillus licheniformis DSM 13] | UniRef100_Q65E21 | Bacillus licheniformis DSM 13 |
| 4358 | ywoG putative transporter | YwoG [Bacillus licheniformis DSM 13] | UniRef100_Q65E20 | Bacillus licheniformis DSM 13 |
| 4359 | bcrC Acid phosphatase_vanadium-dependent | YwoA [Bacillus licheniformis DSM 13] | UniRef100_Q65E19 | Bacillus licheniformis DSM 13 |
| | haloperoxidase | | | |
| 4360 | ppaC inorganic pyrophosphatase | PpaC [Bacillus licheniformis DSM 13] | UniRef100_Q65E18 | Bacillus licheniformis DSM 13 |
| 4361 | ydbD general stress protein, putative manganese- | YdbD [Bacillus licheniformis DSM 13] | UniRef100_Q65E17 | Bacillus licheniformis DSM 13 |
| | containing catalase | | | |
| 4362 | yqjF conserved protein YqjF | Hypothetical protein yqjF [Bacillus licheniformis DSM 13] | UniRef100_Q65E16 | Bacillus licheniformis DSM 13 |
| 4363 | BLP04183 conserved hypothetical protein | Hypothetical protein [Bacillus licheniformis DSM 13] | UniRef100_Q65E15 | Bacillus licheniformis DSM 13 |
| 4364 | yqxL putative metal ion transporter protein, CorA-like | YqxL [Bacillus licheniformis DSM 13] | UniRef100_Q65E14 | Bacillus licheniformis DSM 13 |
| | protein | | | |
| 4365 | yqhB 2-oxo acid dehydrogenase, lipoyl-binding site | YqhB [Bacillus licheniformis DSM 13] | UniRef100_Q65E13 | Bacillus licheniformis DSM 13 |
| | protein | | | |
| 4366 | nrgAB ammonium transporter | NrgA [Bacillus licheniformis DSM 13] | UniRef100_Q65E12 | Bacillus licheniformis DSM 13 |
| 4367 | nrgBB nitrogen-regulated PII-like protein | NrgB [Bacillus licheniformis DSM 13] | UniRef100_Q65E11 | Bacillus licheniformis DSM 13 |
| 4368 | BLP04188 ATP-dependent Clp like protease | Hypothetical protein [Bacillus licheniformis DSM 13] | UniRef100_Q65E10 | Bacillus licheniformis DSM 13 |
| | proteolytic subunit (class III heat-shock protein) | | | |
| 4369 | BLP04189 RNA polymerase ECF(extracytoplasmic | Hypothetical protein (RNA polymerase ECF(Extracytoplasmic | UniRef100_Q65E09 | Bacillus licheniformis DSM 13 |
| | function)-type sigma factor (sigma-M) | function)-type sigma factor) [Bacillus licheniformis DSM 13] | | |
| 4370 | BLP04190 hypothetical protein | | | |
| 4371 | spoIIQ SpoIIQ | Hypothetical protein spoIIQ [Bacillus licheniformis DSM 13] | UniRef100_Q65E08 | Bacillus licheniformis DSM 13 |
| 4372 | ywnH putative phosphinothricin acetyltransferase | YwnH [Bacillus licheniformis DSM 13] | UniRef100_Q65E07 | Bacillus licheniformis DSM 13 |
| 4373 | ywnF putative Beta-ketoacyl synthase | YwnF [Bacillus licheniformis DSM 13] | UniRef100_Q65E06 | Bacillus licheniformis DSM 13 |
| 4374 | ywnE cardiolipin synthetase | YwnE [Bacillus licheniformis DSM 13] | UniRef100_Q65E05 | Bacillus licheniformis DSM 13 |
| 4375 | BLP04195 putative transporter EmrB_QacA subfamily | Hypothetical protein [Bacillus licheniformis DSM 13] | UniRef100_Q65E04 | Bacillus licheniformis DSM 13 |
| 4376 | BLP04196 putative siderophore biosynthesis MtbH | Hypothetical protein [Bacillus licheniformis DSM 13] | UniRef100_Q65E03 | Bacillus licheniformis DSM 13 |
| | like protein | | | |
| 4377 | dhbF putative Nonribosomal peptide synthetase DhbF | Hypothetical protein dhbF [Bacillus licheniformis DSM 13] | UniRef100_Q65E02 | Bacillus licheniformis DSM 13 |
| 4378 | dhbB isochorismatase | DhbB [Bacillus licheniformis DSM 13] | UniRef100_Q65E01 | Bacillus licheniformis DSM 13 |
| 4379 | dhbE 2,3-dihydroxybenzoate-AMP ligase | DhbE [Bacillus licheniformis DSM 13] | UniRef100_Q65E00 | Bacillus licheniformis DSM 13 |
| | (enterobactin synthetase component E) | | | |
| 4380 | dhbC isochorismate synthase | DhbC [Bacillus licheniformis DSM 13] | UniRef100_Q65DZ9 | Bacillus licheniformis DSM 13 |
| 4381 | dhbA 2,3-dihydro-2,3-dihydroxybenzoate | DhbA [Bacillus licheniformis DSM 13] | UniRef100_Q65DZ8 | Bacillus licheniformis DSM 13 |
| | dehydrogenase | | | |
| 4382 | yuiI Putative esterase | YuiI [Bacillus licheniformis DSM 13] | UniRef100_Q65DZ7 | Bacillus licheniformis DSM 13 |
| 4383 | feuC integral membrane protein | FeuC [Bacillus licheniformis DSM 13] | UniRef100_Q65DZ6 | Bacillus licheniformis DSM 13 |
| 4384 | feuB integral membrane protein | FeuB [Bacillus licheniformis DSM 13] | UniRef100_Q65DZ5 | Bacillus licheniformis DSM 13 |
| 4385 | feuA iron-binding protein | FeuA [Bacillus licheniformis DSM 13] | UniRef100_Q65DZ4 | Bacillus licheniformis DSM 13 |
| 4386 | ybbB probable transcriptional regulator (AraC_XylS | YbbB [Bacillus licheniformis DSM 13] | UniRef100_Q65DZ3 | Bacillus licheniformis DSM 13 |
| | family) | | | |
| 4387 | ywnC YwnC | Hypothetical protein ywnG [Bacillus licheniformis DSM 13] | UniRef100_Q65DZ2 | Bacillus licheniformis DSM 13 |
| 4388 | ywnB YwnB | Hypothetical protein ywnB [Bacillus licheniformis DSM 13] | UniRef100_Q65DY9 | Bacillus licheniformis DSM 13 |
| 4389 | ywnA putative transcriptional regulator | YwnA [Bacillus licheniformis DSM 13] | UniRef100_Q65DY8 | Bacillus licheniformis DSM 13 |
| 4390 | BLP04909 conserved hypothetical protein | Hypothetical protein [Bacillus licheniformis DSM 13] | UniRef100_Q65DY7 | Bacillus licheniformis DSM 13 |
| 4391 | ywmF YwmF | Hypothetical protein ywmF [Bacillus licheniformis DSM 13] | UniRef100_Q65DY6 | Bacillus licheniformis DSM 13 |
| 4392 | moaA MoaA | MoaA [Bacillus licheniformis DSM 13] | UniRef100_Q65DY5 | Bacillus licheniformis DSM 13 |
| 4393 | fdhD FdhD | Hypothetical protein fdhD [Bacillus licheniformis DSM 13] | UniRef100_Q65DY4 | Bacillus licheniformis DSM 13 |
| 4394 | BLP04214 putative transporter | Hypothetical protein [Bacillus licheniformis DSM 13] | UniRef100_Q65DY3 | Bacillus licheniformis DSM 13 |
| 4395 | BLP04215 Oxidoreductase alpha (molybdopterin) | Hypothetical protein (EC 1.2.1.2) (Oxidoreductase alpha | UniRef100_Q65DY2 | Bacillus licheniformis DSM 13 |
| | subunit | (Molybdopterin) subunit) [Bacillus licheniformis DSM 13] | | |
| 4396 | ywmD YwmD | Von Willebrand factor, type A [Bacillus licheniformis DSM 13] | UniRef100_Q62PF2 | Bacillus licheniformis DSM 13 |
| 4397 | ywmC YwmC | YwmC [Bacillus licheniformis DSM 13] | UniRef100_Q65DY0 | Bacillus licheniformis DSM 13 |
| 4398 | BLP04218 hypothetical protein | | | |
| 4399 | spoIID SpoIID | Hypothetical protein spoIID [Bacillus licheniformis DSM 13] | UniRef100_Q65DX9 | Bacillus licheniformis DSM 13 |
| 4400 | murAA UDP-N-acetylglucosamine 1- | MurAA [Bacillus licheniformis DSM 13] | UniRef100_Q650X8 | Bacillus licheniformis DSM 13 |
| | carboxyvinyltransferase | | | |
| 4401 | ywmB conserved protein YwmB | Hypothetical protein ywmB [Bacillus licheniformis DSM 13] | UniRef100_Q65DX7 | Bacillus licheniformis DSM 13 |
| 4402 | ywzB conserved protein YwzB | Hypothetical protein ywzB [Bacillus licheniformis DSM 13] | UniRef100_Q65DX6 | Bacillus licheniformis DSM 13 |
| 4403 | atpC ATP synthase (subunit epsilon) | AtpC [Bacillus licheniformis DSM 13] | UniRef100_Q65DX5 | Bacillus licheniformis DSM 13 |
| 4404 | atpD ATP synthase (subunit beta) | AtpD [Bacillus licheniformis DSM 13] | UniRef100_Q65DX4 | Bacillus licheniformis DSM 13 |
| 4405 | atpG ATP synthase (subunit gamma) | AtpG [Bacillus licheniformis DSM 13] | UniRef100_Q65DX3 | Bacillus licheniformis DSM 13 |
| 4406 | atpA ATP synthase (subunit alpha) | AtpA [Bacillus licheniformis DSM 13] | UniRef100_Q65DX2 | Bacillus licheniformis DSM 13 |
| 4407 | atpH ATP synthase (subunit delta) | AtpH [Bacillus licheniformis DSM 13] | UniRef100_Q65DX1 | Bacillus licheniformis DSM 13 |
| 4408 | atpF ATP synthase (subunit b) | AtpF [Bacillus licheniformis DSM 13] | UniRef100_Q65DX0 | Bacillus licheniformis DSM 13 |
| 4409 | atpE ATP synthase C chain AtpE | AtpE [Bacillus licheniformis DSM 13] | UniRef100_Q65DW9 | Bacillus licheniformis DSM 13 |
| 4410 | atpB ATP synthase (subunit a) | AtpB [Bacillus licheniformis DSM 13] | UniRef100_Q65DW8 | Bacillus licheniformis DSM 13 |
| 4411 | atpI ATP synthase (subunit i) | AtpI [Bacillus licheniformis DSM 13] | UniRef100_Q65DW7 | Bacillus licheniformis DSM 13 |
| 4412 | upp uracil phosphoribosyltransferase | Upp [Bacillus licheniformis DSM 13] | UniRef100_Q65DW6 | Bacillus licheniformis DSM 13 |
| 4413 | glyA serine hydroxymethyltransferase | GlyA [Bacillus licheniformis DSM 13] | UniRef100_Q65DW5 | Bacillus licheniformis DSM 13 |
| 4414 | ywlG conserved protein YwlG | Hypothetical protein ywlG [Bacillus licheniformis DSM 13] | UniRef100_Q65DW4 | Bacillus licheniformis DSM 13 |
| 4415 | ywlF Ribose_galactose isomerase | YwlF [Bacillus licheniformis DSM 13] | UniRef100_Q65DW3 | Bacillus licheniformis DSM 13 |
| 4416 | ywlE Low molecular weight phosphotyrosine protein | YwlE [Bacillus licheniformis DSM 13] | UniRef100_Q65DW2 | Bacillus licheniformis DSM 13 |
| | phosphatase | | | |
| 4417 | BLP04236 hypothetical protein | | | |
| 4418 | ywlD YwlD | Hypothetical protein ywlD [Bacillus licheniformis DSM 13] | UniRef100_Q65DW1 | Bacillus licheniformis DSM 13 |
| 4419 | ywlC conserved protein YwlC | YwlC [Bacillus licheniformis DSM 13] | UniRef100_Q65DW0 | Bacillus licheniformis DSM 13 |
| 4420 | ywlB YwlB | Hypothetical protein ywlB [Bacillus licheniformis DSM 13] | UniRef100_Q65DV9 | Bacillus licheniformis DSM 13 |
| 4421 | BLP04240 hypothetical protein | | | |
| 4422 | spoIIR SpoIIR | SpoIIR [Bacillus licheniformis DSM 13] | UniRef100_Q65DV8 | Bacillus licheniformis DSM 13 |
| 4423 | BLP04796 hypothetical protein | | | |
| 4424 | glcP glucose_mannose:H symporter | GlcP [Bacillus licheniformis DSM 13] | UniRef100_Q65DV7 | Bacillus licheniformis DSM 13 |
| 4425 | ntdC putative oxidoreductase | YhjJ [Bacillus licheniformis DSM 13] | UniRef100_Q65DV6 | Bacillus licheniformis DSM 13 |
| 4426 | ntdB HAD-superfamily hydrolase, subfamily IIB | YhjK [Bacillus licheniformis DSM 13] | UniRef100_Q65DV5 | Bacillus licheniformis DSM 13 |
| 4427 | ntdA putative aminotransferase | YhjL [Bacillus licheniformis DSM 13] | UniRef100_Q65DV4 | Bacillus licheniformis DSM 13 |
| 4428 | ntdR transcriptional activator of ntdABC operon (LacI | YhjM [Bacillus licheniformis DSM 13] | UniRef100_Q65DV3 | Bacillus licheniformis DSM 13 |
| | family) | | | |
| 4429 | BLP04247 hypothetical protein | | | |
| 4430 | ywkE YwkE | YwkE [Bacillus licheniformis DSM 13] | UniRef100_Q65DV2 | Bacillus licheniformis DSM 13 |
| 4431 | prfA peptide chain release factor 1 | PrfA [Bacillus licheniformis DSM 13] | UniRef100_Q65DV1 | Bacillus licheniformis DSM 13 |
| 4432 | ywkD YWkD | YwkD [Bacillus licheniformis DSM 13] | UniRef100_Q65DV0 | Bacillus licheniformis DSM 13 |
| 4433 | racA RacA | YwkC [Bacillus licheniformis DSM 13] | UniRef100_Q65DU9 | Bacillus licheniformis DSM 13 |
| 4434 | ywkB conserved membrane protein | YwkB [Bacillus licheniformis DSM 13] | UniRef100_Q65DU8 | Bacillus licheniformis DSM 13 |
| 4435 | BLP04797 hypothetical protein | | | |
| 4436 | ywkA malate dehyrogenase isozyme | Malic oxidoreductase [Bacillus licheniformis DSM 13] | UniRef100_Q62PB9 | Bacillus licheniformis DSM 13 |
| 4437 | tdk thymidine kinase | Tdk [Bacillus licheniformis DSM 13] | UniRef100_Q65DU6 | Bacillus licheniformis DSM 13 |
| 4438 | rpmE ribosomal protein L31 | RpmE [Bacillus licheniformis DSM 13] | UniRef100_Q65DU5 | Bacillus licheniformis DSM 13 |
| 4439 | rho transcriptional terminator Rho | Transcriptional terminator Rho [Bacillus licheniformis DSM 13] | UniRef100_Q65DU4 | Bacillus licheniformis DSM 13 |
| 4440 | ywjI GlpX | YwjI [Bacillus licheniformis DSM 13] | UniRef100_Q65DU3 | Bacillus licheniformis DSM 13 |
| 4441 | murAB UDP-N-acetylglucosamine 1- | MurAB [Bacillus licheniformis DSM 13] | UniRef100_Q65DU2 | Bacillus licheniformis DSM 13 |
| | carboxyvinyltransferase | | | |
| 4442 | tal Transaldolase C | YwjH [Bacillus licheniformis DSM 13] | UniRef100_Q65DU1 | Bacillus licheniformis DSM 13 |
| 4443 | fbaA fructose-1,6-bisphosphate aldolase | FbaA [Bacillus licheniformis DSM 13] | UniRef100_Q65DU0 | Bacillus licheniformis DSM 13 |
| 4444 | spo0F two-component response regulator | Spo0F [Bacillus licheniformis DSM 13] | UniRef100_Q65DT9 | Bacillus licheniformis DSM 13 |
| 4445 | ywjG YwjG | Hypothetical protein ywjG [Bacillus licheniformis DSM 13] | UniRef100_Q65DT8 | Bacillus licheniformis DSM 13 |
| 4446 | BLP04798 hypothetical protein | | | |
| 4447 | pyrG CTP synthetase | PyrG [Bacillus licheniformis DSM 13] | UniRef100_Q65DT7 | Bacillus licheniformis DSM 13 |
| 4448 | BLP04799 hypothetical protein | | | |
| 4449 | rpoE RNA polymerase (delta subunit) | RpoE [Bacillus licheniformis DSM 13] | UniRef100_Q65DT6 | Bacillus licheniformis DSM 13 |
| 4450 | BLP04265 hypothetical protein | | | |
| 4451 | acdA acyl-CoA dehydrogenase | ACdA [Bacillus licheniformis DSM 13] | UniRef100_Q65DT5 | Bacillus licheniformis DSM 13 |
| 4452 | mmgC acyl-CoA dehydrogenase | MmgC [Bacillus licheniformis DSM 13] | UniRef100_Q65DT4 | Bacillus licheniformis DSM 13 |
| 4453 | mmgB 3-hydroxybutyryl-CoA dehydrogenase | MmgB [Bacillus licheniformis DSM 13] | UniRef100_Q65DT3 | Bacillus licheniformis DSM 13 |
| 4454 | mmgA acetyl-CoA acetyltransferase | MmgA [Bacillus licheniformis DSM 13] | UniRef100_Q65DT2 | Bacillus licheniformis DSM 13 |
| 4455 | ywjF 4Fe-4S ferredoxin protein | YwjF [Bacillus licheniformis DSM 13] | UniRef100_Q65DT1 | Bacillus licheniformis DSM 13 |
| 4456 | ywjE putative Phospholipase | Phospholipase D/Transphosphatidylase, Phospholipase | UniRef100_Q62PA2 | Bacillus licheniformis DSM 13 |
| | | D/Transphosphatidylase [Bacillus licheniformis DSM 13] | | |
| 4457 | ywjC YwjC | Hypothetical protein ywjC [Bacillus licheniformis DSM 13] | UniRef100_Q62PA1 | Bacillus licheniformis DSM 13 |
| 4458 | argS arginyl-tRNA synthetase | ArgS [Bacillus licheniformis DSM 13] | UniRef100_Q65DS9 | Bacillus licheniformis DSM 13 |
| 4459 | ywiB conserved protein YwiB | YwiB [Bacillus licheniformis DSM 13] | UniRef100_Q65DS8 | Bacillus licheniformis DSM 13 |
| 4460 | speB agmatinase | SpeB [Bacillus licheniformis DSM 13] | UniRef100_Q65DS7 | Bacillus licheniformis DSM 13 |
| 4461 | speE spermidine synthase | SpeE [Bacillus licheniformis DSM 13] | UniRef100_Q65DS6 | Bacillus licheniformis DSM 13 |
| 4462 | BLP04277 hypothetical protein | Hypothetical protein [Bacillus licheniformis DSM 13] | UniRef100_Q65DS5 | Bacillus licheniformis DSM 13 |
| 4463 | | Hypothetical protein [Bacillus licheniformis DSM 13] | UniRef100_Q65DS4 | Bacillus licheniformis DSM 13 |
| 4464 | ywhE Penicillin-binding protein, Glycosyl Transferase | YwhE [Bacillus licheniformis DSM 13] | UniRef100_Q65DS3 | Bacillus licheniformis DSM 13 |
| | Family 51 | | | |
| 4465 | ywhD YwhD | Hypothetical protein ywhD [Bacillus licheniformis DSM 13] | UniRef100_Q65DS2 | Bacillus licheniformis DSM 13 |
| 4466 | ywhC Peptidase M50 | YwhC [Bacillus licheniformis DSM 13] | UniRef100_Q65DS1 | Bacillus licheniformis DSM 13 |
| 4467 | ywhB putative 4-oxalocrotonate tautomerase | YwhB [Bacillus licheniformis DSM 13] | UniRef100_Q65DS0 | Bacillus licheniformis DSM 13 |
| 4468 | BLP04282 hypothetical protein | Hypothetical protein [Bacillus licheniformis DSM 13] | UniRef100_Q65DR9 | Bacillus licheniformis DSM 13 |
| 4469 | BLP04283 hypothetical protein | | | |
| 4470 | ywgA YwgA | Hypothetical protein ywgA [Bacillus licheniformis DSM 13] | UniRef100_Q65DR8 | Bacillus licheniformis DSM 13 |
| 4471 | ywfO Metal-dependent phosphohydrolase, HD region | YwfO [Bacillus licheniformis DSM 13] | UniRef100_Q65DR7 | Bacillus licheniformis DSM 13 |
| 4472 | BLP04286 hypothetical protein | | | |
| 4473 | ywzC YwzC | Hypothetical protein ywzC [Bacillus licheniformis DSM 13] | UniRef100_Q65DR6 | Bacillus licheniformis DSM 13 |
| 4474 | BLP04800 hypothetical protein | | | |
| 4475 | rsfA putative transcriptional regulatory protein | RsfA [Bacillus licheniformis DSM 13] | UniRef100_Q65DR5 | Bacillus licheniformis DSM 13 |
| 4476 | BLP04801 hypothetical protein | | | |
| 4477 | BLP04289 hypothetical protein | YjdJ [Bacillus licheniformis DSM 13] | UniRef100_Q65DR4 | Bacillus licheniformis DSM 13 |
| 4478 | ywfL conserved protein YwfL | YwfL [Bacillus licheniformis DSM 13] | UniRef100_Q65DR3 | Bacillus licheniformis DSM 13 |
| 4479 | BLP04291 4-hydroxybenzoate 3-monooxygenase | Hypothetical protein [Bacillus licheniformis DSM 13] | UniRef100_Q65DR2 | Bacillus licheniformis DSM 13 |
| 4480 | BLP04292 putative transporter | Hypothetical protein [Bacillus licheniformis DSM 13] | UniRef100_Q65DR1 | Bacillus licheniformis DSM 13 |
| 4481 | BLP04293 aldehyde dehydrogenase | Hypothetical protein [Bacillus licheniformis DSM 13] | UniRef100_Q65DQ7 | Bacillus licheniformis DSM 13 |
| 4482 | BLP04294 hypothetical protein | | | |
| 4483 | BLP04295 transcriptional regulator (IclR family) | Hypothetical protein [Bacillus licheniformis DSM 13] | UniRef100_Q65DQ6 | Bacillus licheniformis DSM 13 |
| 4484 | BLP04296 putative decarboxylase | Hypothetical protein [Bacillus licheniformis DSM 13] | UniRef100_Q65DQ5 | Bacillus licheniformis DSM 13 |
| 4485 | pta phosphotransacetylase | Pta [Bacillus licheniformis DSM 13] | UniRef100_Q65DQ4 | Bacillus licheniformis DSM 13 |
| 4486 | ywfI Chlorite dismutase | YwfI [Bacillus licheniformis DSM 13] | UniRef100_Q65DQ3 | Bacillus licheniformis DSM 13 |
| 4487 | BLP04299 hypothetical protein | | | |
| 4488 | BLP04300 conserved hypothetical protein | Hypothetical protein [Bacillus licheniformis DSM 13] | UniRef100_Q65DQ1 | Bacillus licheniformis DSM 13 |
| 4489 | ktrB K transporter integral membrane subunit | YubG [Bacillus licheniformis DSM 13] | UniRef100_Q65DQ0 | Bacillus licheniformis DSM 13 |
| 4490 | gerQ GerQ | YwdL [Bacillus licheniformis DSM 13] | UniRef100_Q65DP9 | Bacillus licheniformis DSM 13 |
| 4491 | yfiN ABC transporter, family 2, ABC transporter, family 2 | YfiN [Bacillus licheniformis DSM 13] | UniRef100_Q65DP8 | Bacillus licheniformis DSM 13 |
| 4492 | yfiM ABC transport system permease protein | Hypothetical protein yfiM [Bacillus licheniformis DSM 13] | UniRef100_Q65DP7 | Bacillus licheniformis DSM 13 |
| 4493 | yfiL ABC transporter YfiL | YfiL [Bacillus licheniformis DSM 13] | UniRef100_Q65DP6 | Bacillus licheniformis DSM 13 |
| 4494 | BLP04306 Binding-protein-dependent transport | YxjM [Bacillus licheniformis DSM 13] | UniRef100_Q65DP5 | Bacillus licheniformis DSM 13 |
| | systems inner membrane component | | | |
| 4495 | yfiK two-component response regulator | YfiK [Bacillus licheniformis DSM 13] | UniRef100_Q65DP4 | Bacillus licheniformis DSM 13 |
| 4496 | ywdK YwdK | YwdK [Bacillus licheniformis DSM 13] | UniRef100_Q65DP3 | Bacillus licheniformis DSM 13 |
| 4497 | ywdJ putative transporter YwdJ | YwdJ [Bacillus licheniformis DSM 13] | UniRef100_Q65DP2 | Bacillus licheniformis DSM 13 |
| 4498 | ywdI YwdI | Hypothetical protein ywdI [Bacillus licheniformis DSM 13] | UniRef100_Q62P64 | Bacillus licheniformis DSM 13 |
| 4499 | BLP04802 hypothetical protein | | | |
| 4500 | ywdH Aldehyde dehydrogenase, Aldehyde | YwdH [Bacillus licheniformis DSM 13] | UniRef100_Q65DP0 | Bacillus licheniformis DSM 13 |
| | dehydrogenase | | | |
| 4501 | ung uracil-DNA glycosylase | Ung [Bacillus licheniformis DSM 13] | UniRef100_Q65DN9 | Bacillus licheniformis DSM 13 |
| 4502 | ywdF Glycosyl transferase, family 2, YwdF | Glycosyl transferase, family 2 [Bacillus licheniformis DSM 13] | UniRef100_Q62P61 | Bacillus licheniformis DSM 13 |
| 4503 | thiD phosphomethylpyrimidine kinase | ThiD [Bacillus licheniformis DSM 13] | UniRef100_Q65DN7 | Bacillus licheniformis DSM 13 |
| 4504 | ywdA hypothetical protein | Hypothetical protein ywdA [Bacillus licheniformis DSM 13] | UniRef100_Q65DN6 | Bacillus licheniformis DSM 13 |
| 4505 | sacA Glycoside Hydrolase Family 32 | SacA [Bacillus licheniformis DSM 13] | UniRef100_Q65DN5 | Bacillus licheniformis DSM 13 |
| 4506 | sacP phosphotransferase system (PTS) sucrose- | SacP (Phosphotransferase system (PTS) sucrose-specific | UniRef100_Q65DN4 | Bacillus licheniformis DSM 13 |
| | specific enzyme IIBC component | enzyme IIBC component) [Bacillus licheniformis DSM 13] | | |
| 4507 | sacT transcriptional antiterminator | SacT [Bacillus licheniformis DSM 13] | UniRef100_Q65DN3 | Bacillus licheniformis DSM 13 |
| 4508 | BLP04319 hypothetical protein | Hypothetical protein [Bacillus licheniformis DSM 13] | UniRef100_Q62P55 | Bacillus licheniformis DSM 13 |
| 4509 | vpr extracellular serine protease | | | |
| 4510 | BLP04321 hypothetical protein | | | |
| 4511 | BLP04322 hypothetical protein | Hypothetical protein [Bacillus licheniformis DSM 13] | UniRef100_Q62P53 | Bacillus licheniformis DSM 13 |
| 4512 | ywcH putative oxygenase | YwcH [Bacillus licheniformis DSM 13] | UniRef100_Q65DN0 | Bacillus licheniformis DSM 13 |
| 4513 | BLP04324 hypothetical protein | | | |
| 4514 | nfrA1 FMN-containing NADPH-linked nitro_flavin | NfrA [Bacillus licheniformis DSM 13] | UniRef100_Q65DM9 | Bacillus licheniformis DSM 13 |
| | reductase | | | |
| 4515 | BLP04326 Peptidase M20D, amidohydrolase | Hypothetical protein [Bacillus licheniformis DSM 13] | UniRef100_Q65DM8 | Bacillus licheniformis DSM 13 |
| 4516 | rodA RodA | Hypothetical protein rodA [Bacillus licheniformis DSM 13] | UniRef100_Q65DM7 | Bacillus licheniformis DSM 13 |
| 4517 | rodAA cell division protein | Hypothetical protein [Bacillus licheniformis DSM 13] | UniRef100_Q65DM6 | Bacillus licheniformis DSM 13 |
| 4518 | BLP04329 hypothetical protein | | | |
| 4519 | BLP04330 conserved hypothetical protein | Hypothetical protein [Bacillus licheniformis DSM 13] | UniRef100_Q65DM5 | Bacillus licheniformis DSM 13 |
| 4520 | ywcE conserved hypothetical protein YwcE | Hypothetical protein ywcE [Bacillus licheniformis DSM 13] | UniRef100_Q65DM3 | Bacillus licheniformis DSM 13 |
| 4521 | BLP04332 hypothetical protein | Hypothetical protein [Bacillus licheniformis DSM 13] | UniRef100_Q65DM2 | Bacillus licheniformis DSM 13 |
| 4522 | BLP04333 putative N-acetyltransferase | YfmK [Bacillus licheniformis DSM 13] | UniRef100_Q65DM1 | Bacillus licheniformis DSM 13 |
| 4523 | BLP04334 ABC transporter | Hypothetical protein [Bacillus licheniformis DSM 13] | UniRef100_Q65DM0 | Bacillus licheniformis DSM 13 |
| 4524 | BLP04335 ABC transporter | Hypothetical protein [Bacillus licheniformis DSM 13] | UniRef100_Q65DL9 | Bacillus licheniformis DSM 13 |
| 4525 | BLP04336 hypothetical protein | Hypothetical protein [Bacillus licheniformis DSM 13] | UniRef100_Q65DL8 | Bacillus licheniformis DSM 13 |
| 4526 | BLP04337 hypothetical protein | Hypothetical protein [Bacillus licheniformis DSM 13] | UniRef100_Q65DL7 | Bacillus licheniformis DSM 13 |
| 4527 | BLP04338 hypothetical protein | Hypothetical protein [Bacillus licheniformis DSM 13] | UniRef100_Q65DL6 | Bacillus licheniformis DSM 13 |
| 4528 | BLP04339 two-component response regulator | Hypothetical protein [Bacillus licheniformis DSM 13] | UniRef100_Q65DL5 | Bacillus licheniformis DSM 13 |
| 4529 | BLP04340 hypothetical protein | Hypothetical protein [Bacillus licheniformis DSM 13] | UniRef100_Q62P36 | Bacillus licheniformis DSM 13 |
| 4530 | qoxD cytochrome aa3 quinol oxidase (subunit IV) | QoxD [Bacillus licheniformis DSM 13] | UniRef100_Q65DL4 | Bacillus licheniformis DSM 13 |
| 4531 | qoxC cytochrome aa3 quinol oxidase (subunit III) | QoxC [Bacillus licheniformis DSM 13] | UniRef100_Q65DL3 | Bacillus licheniformis DSM 13 |
| 4532 | qoxB cytochrome aa3 quinol oxidase (subunit I) | QoxB [Bacillus licheniformis DSM 13] | UniRef100_Q65DL2 | Bacillus licheniformis DSM 13 |
| 4533 | qoxA cytochrome aa3 quinol oxidase (subunit II) | QoxA [Bacillus licheniformis DSM 13] | UniRef100_Q65DL1 | Bacillus licheniformis DSM 13 |
| 4534 | galE UDP-glucose 4-epimerase | GalE [Bacillus licheniformis DSM 13] | UniRef100_Q65DL0 | Bacillus licheniformis DSM 13 |
| 4535 | BLP04346 hypothetical protein | Hypothetical protein [Bacillus licheniformis DSM 13] | UniRef100_Q62P30 | Bacillus licheniformis DSM 13 |
| 4536 | BLP04347 sporulation inhibition like protein | Hypothetical protein [Bacillus licheniformis DSM 13] | UniRef100_Q65DK9 | Bacillus licheniformis DSM 13 |
| 4537 | BLP04348 hypothetical protein | Hypothetical protein [Bacillus licheniformis DSM 13] | UniRef100_Q62P28 | Bacillus licheniformis DSM 13 |
| 4538 | BLP04349 conserved hypothetical protein YwqN | YwqN [Bacillus licheniformis DSM 13] | UniRef100_Q65DK7 | Bacillus licheniformis DSM 13 |
| 4539 | ywcB conserved protein YwcB | Hypothetical protein ywcB [Bacillus licheniformis DSM 13] | UniRef100_Q65DK6 | Bacillus licheniformis DSM 13 |
| 4540 | ywcA Na_solute symporter | YwcA [Bacillus licheniformis DSM 13] | UniRef100_Q65DK5 | Bacillus licheniformis DSM 13 |
| 4541 | xylB xylulose kinase | XylB [Bacillus licheniformis DSM 13] | UniRef100_Q65DK4 | Bacillus licheniformis DSM 13 |
| 4542 | xylA xylose isomerase | Xylose isomerase [Bacillus licheniformis] | UniRef100_P77832 | Bacillus licheniformis |
| 4543 | xylR transcriptional regulator XylR | XylR [Bacillus licheniformis DSM 13] | UniRef100_Q65DK2 | Bacillus licheniformis DSM 13 |
| 4544 | BLP04803 hypothetical protein | Hypothetical protein [Bacillus licheniformis DSM 13] | UniRef100_Q65DK1 | Bacillus licheniformis DSM 13 |
| 4545 | thiE thiamine-phosphate pyrophosphorylase | ThiE [Bacillus licheniformis DSM 13] | UniRef100_Q65DK0 | Bacillus licheniformis DSM 13 |
| 4546 | thiM hydroxyethylthiazole kinase | ThiM [Bacillus licheniformis DSM 13] | UniRef100_Q65DJ9 | Bacillus licheniformis DSM 13 |
| 4547 | BLP04358 hypothetical protein | Putative HTH-type transcriptional regulator ywbl [Bacillus | UniRef100_P39592 | Bacillus subtilis |
| | | subtilis] | | |
| 4548 | ywqIA conserved hypothetical protein | Hypothetical protein ywqIA [Bacillus licheniformis DSM 13] | UniRef100_Q65DJ6 | Bacillus licheniformis DSM 13 |
| 4549 | ywqH conserved hypothetical protein | Hypothetical protein [Bacillus licheniformis DSM 13] | UniRef100_Q62P15 | Bacillus licheniformis DSM 13 |
| 4550 | ywbH conserved membrane protein YwbH | YwbH [Bacillus licheniformis DSM 13] | UniRef100_Q65DJ4 | Bacillus licheniformis DSM 13 |
| 4551 | ywbG peptidoglycan hydrolase YwbG | Hypothetical protein ywbG [Bacillus licheniformis DSM 13] | UniRef100_Q65DJ3 | Bacillus licheniformis DSM 13 |
| 4552 | BLP04363 hypothetical protein | Hypothetical protein [Bacillus licheniformis DSM 13] | UniRef100_Q62P12 | Bacillus licheniformis DSM 13 |
| 4553 | BLP04364 proline transporter | Hypothetical protein [Bacillus licheniformis DSM 13] | UniRef100_Q65DJ2 | Bacillus licheniformis DSM 13 |
| 4554 | ywbD SAM (and some other nucleotide) binding | YwbD (SAM (And some other nucleotide) binding motif, PUA | UniRef100_Q65DJ1 | Bacillus licheniformis DSM 13 |
| | motif, PUA domain | domain) [Bacillus licheniformis DSM 13] | | |
| 4555 | ywbC putative lyase YwbC | YwbC [Bacillus licheniformis DSM 13] | UniRef100_Q65DJ0 | Bacillus licheniformis DSM 13 |
| 4556 | BLP04367 D-isomer specific 2-hydroxyacid | YoaD [Bacillus licheniformis DSM 13] | UniRef100_Q65DI9 | Bacillus licheniformis DSM 13 |
| | dehydrogenase, NAD binding domain | | | |
| 4557 | gspA Glycosyl Transferase Family 8 | GspA [Bacillus licheniformis DSM 13] | UniRef100_Q65DI7 | Bacillus licheniformis DSM 13 |
| 4558 | BLP04369 hypothetical protein | | | |
| 4559 | BLP04370 hypothetical protein | | | |
| 4560 | BLP04371 hypothetical protein | | | |
| 4561 | ydfH Histidine kinase YdfH | YdfH [Bacillus licheniformis DSM 13] | UniRef100_Q65DI6 | Bacillus licheniformis DSM 13 |
| 4562 | ydfI putative transcriptional regulator YdfI | YdfI [Bacillus licheniformis DSM 13] | UniRef100_Q65DI5 | Bacillus licheniformis DSM 13 |
| 4563 | ydfJ Sterol-sensing 5TM box YdfJ | YdfJ [Bacillus licheniformis DSM 13] | UniRef100_Q65DI4 | Bacillus licheniformis DSM 13 |
| 4564 | BLP04375 2-keto-3-deoxygluconate kinase | Hypothetical protein [Bacillus licheniformis DSM 13] | UniRef100_Q65DH9 | Bacillus licheniformis DSM 13 |
| 4565 | BLP04376 transcriptional regulator (IclR family) | Hypothetical protein [Bacillus licheniformis DSM 13] | UniRef100_Q65DH8 | Bacillus licheniformis DSM 13 |
| 4566 | ywaD Putative aminopeptidase | YwaD [Bacillus licheniformis DSM 13] | UniRef100_Q65DH7 | Bacillus licheniformis DSM 13 |
| 4567 | ywoD Major facilitator superfamily protein YwoD | YwoD [Bacillus licheniformis DSM 13] | UniRef100_Q65DH6 | Bacillus licheniformis DSM 13 |
| 4568 | BLP04379 hypothetical protein | Hypothetical protein [Bacillus licheniformis DSM 13] | UniRef100_Q65DH5 | Bacillus licheniformis DSM 13 |
| 4569 | BLP04380 hypothetical protein | | | |
| 4570 | ywaC putative GTP-pyrophosphokinase YwaC | YwaC [Bacillus licheniformis DSM 13] | UniRef100_Q65DH3 | Bacillus licheniformis DSM 13 |
| 4571 | BLP04382 hypothetical protein | | | |
| 4572 | BLP04383 hypothetical protein | DltA [Bacillus licheniformis DSM 13] | UniRef100_Q65DH2 | Bacillus licheniformis DSM 13 |
| 4573 | dltA D-alanyl-D-alanine carrier protein ligase (Dcl) | DltA [Bacillus licheniformis DSM 13] | UniRef100_Q65DH1 | Bacillus licheniformis DSM 13 |
| 4574 | dltB DltB | Hypothetical protein dltB [Bacillus licheniformis DSM 13] | UniRef100_Q65DH0 | Bacillus licheniformis DSM 13 |
| 4575 | dltC D-alanyl carrier protein | DltC [Bacillus licheniformis DSM 13] | UniRef100_Q65DG9 | Bacillus licheniformis DSM 13 |
| 4576 | dltD precusor DltD | Hypothetical protein dltD [Bacillus licheniformis DSM 13] | UniRef100_Q65DG8 | Bacillus licheniformis DSM 13 |
| 4577 | ywaA Branched-chain amino acid aminotransferase II | YwaA [Bacillus licheniformis DSM 13] | UniRef100_Q65DG7 | Bacillus licheniformis DSM 13 |
| 4578 | BLP04389 hypothetical protein | | | |
| 4579 | yvqJ putative macrolide-efflux protein | Hypothetical protein yvqJ [Bacillus licheniformis DSM 13] | UniRef100_Q65DG6 | Bacillus licheniformis DSM 13 |
| 4580 | licH Glycoside Hydrolase Family 4 | LicH [Bacillus licheniformis DSM 13] | UniRef100_Q65DG5 | Bacillus licheniformis DSM 13 |
| 4581 | licA phosphotransferase system (PTS) lichenan- | LicA (Phosphotransferase system (PTS) lichenan-specific | UniRef100_Q65DG4 | Bacillus licheniformis DSM 13 |
| | specific enzyme IIA component | enzyme IIA component) [Bacillus licheniformis DSM 13] | | |
| 4582 | licC phosphotransferase system (PTS) lichenan- | LicC (Phosphotransferase system (PTS) lichenan-specific | UniRef100_Q65DG3 | Bacillus licheniformis DSM 13 |
| | specific enzyme IIC component | enzyme IIC component) [Bacillus licheniformis DSM 13] | | |
| 4583 | licB phosphotransferase system (PTS) lichenan- | LicB (Phosphotransferase system (PTS) lichenan-specific | UniRef100_Q65DG2 | Bacillus licheniformis DSM 13 |
| | specific enzyme IIB component | enzyme IIB component) [Bacillus licheniformis DSM 13] | | |
| 4584 | licR transcriptional regulator | LicR [Bacillus licheniformis DSM 13] | UniRef100_Q65DG1 | Bacillus licheniformis DSM 13 |
| 4585 | yxzF YxzF | Hypothetical protein yxzF [Bacillus licheniformis DSM 13] | UniRef100_Q65DG0 | Bacillus licheniformis DSM 13 |
| 4586 | yxlJ Methylpurine-DNA glycosylase (MPG) | YxlJ [Bacillus licheniformis DSM 13] | UniRef100_Q65DF9 | Bacillus licheniformis DSM 13 |
| 4587 | BLP04398 putative transcriptional regulator | Hypothetical protein [Bacillus licheniformis DSM 13] | UniRef100_Q65DF8 | Bacillus licheniformis DSM 13 |
| 4588 | mmgD citrate synthase III | MmgD [Bacillus licheniformis DSM 13] | UniRef100_Q65DF7 | Bacillus licheniformis DSM 13 |
| 4589 | mmgE 2-methylisocitrate dehydratase | Hypothetical protein mmgE [Bacillus licheniformis DSM 13] | UniRef100_Q65DF6 | Bacillus licheniformis DSM 13 |
| 4590 | yqiQ putative cartoxyphosphonoenolpyruvate | YqiQ [Bacillus licheniformis DSM 13] | UniRef100_Q65DF5 | Bacillus licheniformis DSM 13 |
| | phosphonomutase | | | |
| 4591 | BLP04402 Chromate transporter | Hypothetical protein [Bacillus licheniformis DSM 13] | UniRef100_Q65DF4 | Bacillus licheniformis DSM 13 |
| 4592 | BLP04403 conserved hypothetical protein | Hypothetical protein [Bacillus licheniformis DSM 13] | UniRef100_Q65DF3 | Bacillus licheniformis DSM 13 |
| 4593 | ywjA Glycoside hydrolase, family 1, ABC transporter | YwjA [Bacillus licheniformis DSM 13] | UniRef100_Q65DF2 | Bacillus licheniformis DSM 13 |
| 4594 | BLP04405 Carbohydrate Esterase Family 12, putative | Hypothetical protein [Bacillus licheniformis DSM 13] | UniRef100_Q65DF1 | Bacillus licheniformis DSM 13 |
| | beta-tubulin | | | |
| 4595 | yweA YweA | Hypothetical protein yweA [Bacillus licheniformis DSM 13] | UniRef100_Q65DF0 | Bacillus licheniformis DSM 13 |
| 4596 | BLP04407 hypothetical protein | YweA [Bacillus licheniformis DSM 13] | UniRef100_Q65DE9 | Bacillus licheniformis DSM 13 |
| 4597 | BLP04408 Drug resistance transporter | Hypothetical protein [Bacillus licheniformis DSM 13] | UniRef100_Q65DE8 | Bacillus licheniformis DSM 13 |
| 4598 | yxlG YxlG | Hypothetical protein yxlG [Bacillus licheniformis DSM 13] | UniRef100_Q65DE7 | Bacillus licheniformis DSM 13 |
| 4599 | yxlF ABC transporter | YxlF [Bacillus licheniformis DSM 13] | UniRef100_Q65DE6 | Bacillus licheniformis DSM 13 |
| 4600 | yxlE YxlE | | | |
| 4601 | yxlD YxlD | Hypothetical protein yxlD [Bacillus licheniformis DSM 13] | UniRef100_Q65DE4 | Bacillus licheniformis DSM 13 |
| 4602 | yxlC YxlC | Hypothetical protein yxlC [Bacillus licheniformis DSM 13] | UniRef100_Q65DE3 | Bacillus licheniformis DSM 13 |
| 4603 | sigY RNA polymerase ECF(extracytoplasmic | SigY (RNA polymerase ECF(Extracytoplasmic function)-type | UniRef100_Q65DE2 | Bacillus licheniformis DSM 13 |
| | function)-type sigma factor (sigma-Y) | sigma factor) [Bacillus licheniformis DSM 13] | | |
| 4604 | yxlH putative electron transport protein YxlH | YxlH [Bacillus licheniformis DSM 13] | UniRef100_Q65DE1 | Bacillus licheniformis DSM 13 |
| 4605 | BLP04416 hypothetical protein | | | |
| 4606 | katX major catalase in spores | KatX [Bacillus licheniformis DSM 13] | UniRef100_Q65DE0 | Bacillus licheniformis DSM 13 |
| 4607 | BLP04418 conserved hypothetical protein | Hypothetical protein [Bacillus licheniformis DSM 13] | UniRef100_Q65DD9 | Bacillus licheniformis DSM 13 |
| 4608 | BLP04419 hypothetical protein | KatA [Bacillus licheniformis DSM 13] | UniRef100_Q65DD8 | Bacillus licheniformis DSM 13 |
| 4609 | BLP04420 transcriptional regulator (Fur family) | Hypothetical protein [Bacillus licheniformis DSM 13] | UniRef100_Q65DD7 | Bacillus licheniformis DSM 13 |
| 4610 | BLP04421 putative ferrochelatase | Hypothetical protein [Bacillus licheniformis DSM 13] | UniRef100_Q65DD6 | Bacillus licheniformis DSM 13 |
| 4611 | lanI lantibiotic immunity protein | Hypothetical protein [Bacillus licheniformis DSM 13] | UniRef100_Q65DD5 | Bacillus licheniformis DSM 13 |
| 4612 | lanH lantibiotic immunity protein, ABC transporter | Hypothetical protein [Bacillus licheniformis DSM 13] | UniRef100_Q65DD4 | Bacillus licheniformis DSM 13 |
| 4613 | lanE lantibiotic immunity protein | Hypothetical protein [Bacillus licheniformis DSM 13] | UniRef100_Q65DD3 | Bacillus licheniformis DSM 13 |
| 4614 | lanG lantibiotic immunity protein, MFS type | Hypothetical protein [Bacillus licheniformis DSM 13] | UniRef100_Q65DD2 | Bacillus licheniformis DSM 13 |
| | transporter | | | |
| 4615 | lanF lantibiotic immunity protein, ABC transporter | Hypothetical protein [Bacillus licheniformis DSM 13] | UniRef100_Q65DD1 | Bacillus licheniformis DSM 13 |
| 4616 | lanY LanY | Hypothetical protein [Bacillus licheniformis DSM 13] | UniRef100_Q65DD0 | Bacillus licheniformis DSM 13 |
| 4617 | lanR transcriptional regulator | Hypothetical protein [Bacillus licheniformis DSM 13] | UniRef100_Q65DC9 | Bacillus licheniformis DSM 13 |
| 4618 | lanX conserved hypothetical protein | Hypothetical protein [Bacillus licheniformis DSM 13] | UniRef100_Q65DC8 | Bacillus licheniformis DSM 13 |
| 4619 | lanP intracellular serine protease | Hypothetical protein [Bacillus licheniformis DSM 13] | UniRef100_Q65DC7 | Bacillus licheniformis DSM 13 |
| 4620 | lanT lantibiotic transport protein | Hypothetical protein [Bacillus licheniformis DSM 13] | UniRef100_Q65DC6 | Bacillus licheniformis DSM 13 |
| 4621 | lanM1 lantibiotic modifying enzyme | Hypothetical protein [Bacillus licheniformis DSM 13] | UniRef100_Q65DC5 | Bacillus licheniformis DSM 13 |
| 4622 | BLP04804 hypothetical protein | Lantibiotic cytolysin [Bacillus halodurans] | UniRef100_Q9KFM6 | Bacillus halodurans |
| 4623 | lanA lichenicidin prepeptide | Hypothetical protein [Bacillus licheniformis DSM 13] | UniRef100_Q65DC4 | Bacillus licheniformis DSM 13 |
| 4624 | lanM2 lantibiotic modifying enzyme | Hypothetical protein [Bacillus licheniformis DSM 13] | UniRef100_Q65DC3 | Bacillus licheniformis DSM 13 |
| 4625 | pelII pectate lyase, Polysaccharide Lyase Family 1 | Pectate lyase Pel-34K [Bacillus sp. P-2850] | UniRef100_Q8L0S6 | Bacillus sp. P-2850 |
| 4626 | qdoI putative ribokinase | Hypothetical protein yxkO [Bacillus licheniformis DSM 13] | UniRef100_Q65DC1 | Bacillus licheniformis DSM 13 |
| 4627 | cydD ABC membrane transporter (ATP-binding | CydD [Bacillus licheniformis DSM 13] | UniRef100_Q65DC0 | Bacillus licheniformis DSM 13 |
| | protein) | | | |
| 4628 | cydC ABC membrane transporter (ATP-binding | CydC [Bacillus licheniformis DSM 13] | UniRef100_Q65DB9 | Bacillus licheniformis DSM 13 |
| | protein) | | | |
| 4629 | cydB cytochrome bd ubiquinol oxidase (subunit II) | CydB [Bacillus licheniformis DSM 13] | UniRef100_Q65DB8 | Bacillus licheniformis DSM 13 |
| 4630 | cydA cytochrome bd ubiquinol oxidase (subunit I) | CydA [Bacillus licheniformis DSM 13] | UniRef100_Q65DB7 | Bacillus licheniformis DSM 13 |
| 4631 | BLP04441 hypothetical protein | | | |
| 4632 | ywcJ Formate_nitrite transporter | YwcJ [Bacillus licheniformis DSM 13] | UniRef100_Q65DB6 | Bacillus licheniformis DSM 13 |
| 4633 | BLP04443 hypothetical protein | | | |
| 4634 | BLP04444 hypothetical protein | Hypothetical protein [Bacillus licheniformis DSM 13] | UniRef100_Q65DB5 | Bacillus licheniformis DSM 13 |
| 4635 | mleA malolactic enzyme | MleA [Bacillus licheniformis DSM 13] | UniRef100_Q65DB4 | Bacillus licheniformis DSM 13 |
| 4636 | mleN malate-H_Na-lactate antiporter | MleN [Bacillus licheniformis DSM 13] | UniRef100_Q65DB3 | Bacillus licheniformis DSM 13 |
| 4637 | ansB L-aspartase | Hypothetical protein [Bacillus licheniformis DSM 13] | UniRef100_Q65DB2 | Bacillus licheniformis DSM 13 |
| 4638 | ansA L-asparaginase | AnsA [Bacillus licheniformis DSM 13] | UniRef100_Q65DB1 | Bacillus licheniformis DSM 13 |
| 4639 | ansR transcriptional regulator | AnsR [Bacillus licheniformis DSM 13] | UniRef100_Q65DB0 | Bacillus licheniformis DSM 13 |
| 4640 | ykgB YkgB | YkgB [Bacillus licheniformis DSM 13] | UniRef100_Q65DA9 | Bacillus licheniformis DSM 13 |
| 4641 | BLP04451 putative two-component reponse regulator | Hypothetical sensory transduction protein yxdJ [Bacillus | UniRef100_P42421 | Bacillus subtilis |
| | | subtilis] | | |
| 4642 | yxdK Histidine kinase, homodimeric YxdK | YxdK [Bacillus licheniformis DSM 13] | UniRef100_Q65DA6 | Bacillus licheniformis DSM 13 |
| 4643 | BLP04453 hypothetical protein | | | |
| 4644 | yxdL ABC transporter YxdL | YxdL [Bacillus licheniformis DSM 13] | UniRef100_Q65DA5 | Bacillus licheniformis DSM 13 |
| 4645 | yxdM GTP-binding signal recognition particle (SRP54) | | | |
| | G-domain | | | |
| 4646 | BLP04457 conserved hypothetical protein | YxeA [Bacillus licheniformis DSM 13] | UniRef100_Q65DA3 | Bacillus licheniformis DSM 13 |
| 4647 | BLP04458 hypothetical protein | | | |
| 4648 | BLP04459 conserved hypothetical protein | Hypothetical protein [Bacillus licheniformis DSM 13] | UniRef100_Q65DA1 | Bacillus licheniformis DSM 13 |
| 4649 | yxkH Polysaccharide deacetylase, Carbohydrate | | | |
| | Esterase Family 4 | | | |
| 4650 | BLP04461 conserved hypothetical protein | Hypothetical protein [Bacillus licheniformis DSM 13] | UniRef100_Q65D99 | Bacillus licheniformis DSM 13 |
| 4651 | ydeL hypothetical DNA-binding protein YdeL | Hypothetical protein [Bacillus licheniformis DSM 13] | UniRef100_Q65D98 | Bacillus licheniformis DSM 13 |
| 4652 | BLP04463 putative Glycosyl transferase, family 2 | Hypothetical protein [Bacillus licheniformis DSM 13] | UniRef100_Q65D97 | Bacillus licheniformis DSM 13 |
| 4653 | cimH Citrate carrier protein | YxkJ [Bacillus licheniformis DSM 13] | UniRef100_Q65D96 | Bacillus licheniformis DSM 13 |
| 4654 | BLP04465 putative Glycerophosphoryl diester | Hypothetical protein [Bacillus licheniformis DSM 13] | UniRef100_Q65D95 | Bacillus licheniformis DSM 13 |
| | phosphodiesterase | | | |
| 4655 | yhjA conserved hypothetical protein | YhjA [Bacillus licheniformis DSM 13] | UniRef100_Q65D94 | Bacillus licheniformis DSM 13 |
| 4656 | BLP04467 hypothetical protein | Hypothetical protein [Bacillus licheniformis DSM 13] | UniRef100_Q62NR9 | Bacillus licheniformis DSM 13 |
| 4657 | yfnI putative sulfatase | YfnI [Bacillus licheniformis DSM 13] | UniRef100_Q65D92 | Bacillus licheniformis DSM 13 |
| 4658 | BLP04469 hypothetical protein | | | |
| 4659 | yfjD hypothetical protein | Hypothetical protein yfjD [Bacillus licheniformis DSM 13] | UniRef100_Q65D91 | Bacillus licheniformis DSM 13 |
| 4660 | yxkD YxkD | Hypothetical protein yxkD [Bacillus licheniformis DSM 13] | UniRef100_Q65D90 | Bacillus licheniformis DSM 13 |
| 4661 | argR transcriptional regulator of arginine metabolism | Transcriptional regulator [Bacillus licheniformis DSM 13] | UniRef100_Q62NR5 | Bacillus licheniformis DSM 13 |
| | expression | | | |
| 4662 | arcA Arginine deiminase | Arginine deiminase [Bacillus licheniformis] | UniRef100_O86131 | Bacillus licheniformis |
| 4663 | arcB ornithine carbamoyltransferase | Ornithine carbamoyltransferase, catabolic [Bacillus | UniRef100_O86132 | Bacillus licheniformis |
| | | licheniformis] | | |
| 4664 | arcD Amino acid_polyamine transporter permease | Permease [Bacillus licheniformis] | UniRef100_O86133 | Bacillus licheniformis |
| 4665 | arcC carbamate kinase | Carbamate kinase [Bacillus licheniformis] | UniRef100_O86134 | Bacillus licheniformis |
| 4666 | BLP04477 transcriptional regulator Fnr family protein | Crp/Fnr family protein [Bacillus licheniformis] | UniRef100_Q9K5F3 | Bacillus licheniformis |
| 4667 | BLP04478 Glycoside hydrolase, family 1 | Hypothetical protein [Bacillus licheniformis DSM 13] | UniRef100_Q65D83 | Bacillus licheniformis DSM 13 |
| 4668 | BLP04479 phosphotransferase system (PTS) | Hypothetical protein (Phosphotransferase system (PTS) | UniRef100_Q65D82 | Bacillus licheniformis DSM 13 |
| | lichenan-specific enzyme IIC component | lichenan-specific enzyme IIC component) [Bacillus | | |
| | | licheniformis DSM 13] | | |
| 4669 | BLP04480 hypothetical protein | | | |
| 4670 | BLP04481 hypothetical protein | Hypothetical protein [Bacillus licheniformis DSM 13] | UniRef100_Q65D81 | Bacillus licheniformis DSM 13 |
| 4671 | BLP04482 putative RNA polymerase | Hypothetical protein [Bacillus licheniformis DSM 13] | UniRef100_Q65D80 | Bacillus licheniformis DSM 13 |
| 4672 | BLP04483 hypothetical protein | Hypothetical protein [Bacillus licheniformis DSM 13] | UniRef100_Q65D78 | Bacillus licheniformis DSM 13 |
| 4673 | pepT peptidase T (tripeptidase) | PepT [Bacillus licheniformis DSM 13] | UniRef100_Q65D74 | Bacillus licheniformis DSM 13 |
| 4674 | BLP04485 Glycoside Hydrolase Family 32 | Hypothetical protein [Bacillus licheniformis DSM 13] | UniRef100_Q65D73 | Bacillus licheniformis DSM 13 |
| 4675 | ywbF putative sugar permease YwbF | YwbF [Bacillus licheniformis DSM 13] | UniRef100_Q65D72 | Bacillus licheniformis DSM 13 |
| 4676 | BLP04487 Binding-protein-dependent transport | Hypothetical protein [Bacillus licheniformis DSM 13] | UniRef100_Q65D71 | Bacillus licheniformis DSM 13 |
| | systems inner membrane component | | | |
| 4677 | BLP04488 Binding-protein-dependent transport | YurN [Bacillus licheniformis DSM 13] | UniRef100_Q65D70 | Bacillus licheniformis DSM 13 |
| | systems inner membrane component | | | |
| 4678 | BLP04489 putative extracellular solute-binding protein | Hypothetical protein [Bacillus licheniformis DSM 13] | UniRef100_Q65D69 | Bacillus licheniformis DSM 13 |
| 4679 | BLP04490 putative transcriptional regulator | Hypothetical protein [Bacillus licheniformis DSM 13] | UniRef100_Q65D68 | Bacillus licheniformis DSM 13 |
| 4680 | BLP04491 hypothetical protein | Hypothetical protein [Bacillus licheniformis DSM 13] | UniRef100_Q65D67 | Bacillus licheniformis DSM 13 |
| 4681 | BLP04492 hypothetical protein | Hypothetical protein [Bacillus licheniformis DSM 13] | UniRef100_Q65D66 | Bacillus licheniformis DSM 13 |
| 4682 | BLP04493 conserved hypothetical protein | Hypothetical protein [Bacillus licheniformis DSM 13] | UniRef100_Q65D65 | Bacillus licheniformis DSM 13 |
| 4683 | yxjG methionine synthase | YxjG [Bacillus licheniformis DSM 13] | UniRef100_Q65D64 | Bacillus licheniformis DSM 13 |
| 4684 | ykcB Glycosyl transferase, family 39 | YkcB [Bacillus licheniformis DSM 13] | UniRef100_Q65D63 | Bacillus licheniformis DSM 13 |
| 4685 | ykcC Glycosyl transferase, family 2 | YkcC [Bacillus licheniformis DSM 13] | UniRef100_Q65D62 | Bacillus licheniformis DSM 13 |
| 4686 | BLP04497 UDP-glucose 4-epimerase | Hypothetical protein [Bacillus licheniformis DSM 13] | UniRef100_Q65D61 | Bacillus licheniformis DSM 13 |
| 4687 | BLP04498 partial protein | | | |
| 4688 | BLP04499 hypothetical protein | Hypothetical protein [Bacillus licheniformis DSM 13] | UniRef100_Q65D60 | Bacillus licheniformis DSM 13 |
| 4689 | BLP04500 hypothetical protein | Hypothetical protein [Bacillus licheniformis DSM 13] | UniRef100_Q65D60 | Bacillus licheniformis DSM 13 |
| 4690 | BLP04501 hypothetical protein | Hypothetical protein [Bacillus licheniformis DSM 13] | UniRef100_Q65D59 | Bacillus licheniformis DSM 13 |
| 4691 | BLP04502 hypothetical protein | Hypothetical protein [Bacillus licheniformis DSM 13] | UniRef100_Q65D58 | Bacillus licheniformis DSM 13 |
| 4692 | BLP04503 conserved hypothetical protein | Hypothetical protein [Bacillus licheniformis DSM 13] | UniRef100_Q65D57 | Bacillus licheniformis DSM 13 |
| 4693 | BLP04504 hypothetical protein | | | |
| 4694 | yxjA Concentrative nucleoside transporter | YxjA [Bacillus licheniformis DSM 13] | UniRef100_Q65D56 | Bacillus licheniformis DSM 13 |
| 4695 | katA vegetative catalase 1 | Catalase 2 [Bacillus subtilis] | UniRef100_P42234 | Bacillus subtilis |
| 4696 | BLP04507 putative DNA Gyrase inhibitor | YosT [Bacillus licheniformis DSM 13] | UniRef100_Q65D53 | Bacillus licheniformis DSM 13 |
| 4697 | BLP04508 Glycoside hydrolase, family 1 | Hypothetical protein [Bacillus licheniformis DSM 13] | UniRef100_Q65D52 | Bacillus licheniformis DSM 13 |
| 4698 | bglPA phosphotransferase system (PTS) beta- | Hypothetical protein (Phosphotransferase system (PTS) beta- | UniRef100_Q65D51 | Bacillus licheniformis DSM 13 |
| | glucoside-specific enzyme IIBCA component | glucoside-specific enzyme IIBCA component) [Bacillus | | |
| | | licheniformis DSM 13] | | |
| 4699 | licT transcriptional antiterminator | LicT [Bacillus licheniformis DSM 13] | UniRef100_Q65D50 | Bacillus licheniformis DSM 13 |
| 4700 | BLP04511 Cobalt transport protein | YkoC [Bacillus licheniformis DSM 13] | UniRef100_Q65D49 | Bacillus licheniformis DSM 13 |
| 4701 | BLP04512 ABC transporter | YkoD [Bacillus licheniformis DSM 13] | UniRef100_Q65D48 | Bacillus licheniformis DSM 13 |
| 4702 | BLP04513 conserved hypothetical protein | YkoE [Bacillus licheniformis DSM 13] | UniRef100_Q65D47 | Bacillus licheniformis DSM 13 |
| 4703 | tenAA transcriptional regulator | Hypothetical protein [Bacillus licheniformis DSM 13] | UniRef100_Q65D46 | Bacillus licheniformis DSM 13 |
| 4704 | BLP04515 conserved hypothetical protein | Hypothetical protein [Bacillus licheniformis DSM 13] | UniRef100_Q65D45 | Bacillus licheniformis DSM 13 |
| 4705 | aceA Isocitrate lyase | Hypothetical protein [Bacillus licheniformis DSM 13] | UniRef100_Q65D44 | Bacillus licheniformis DSM 13 |
| 4706 | aceB Malate synthase A | Hypothetical protein [Bacillus licheniformis DSM 13] | UniRef100_Q65D43 | Bacillus licheniformis DSM 13 |
| 4707 | BLP04518 conserved hypothetical protein | Hypothetical protein [Bacillus licheniformis DSM 13] | UniRef100_Q62NL9 | Bacillus licheniformis DSM 13 |
| 4708 | BLP04519 hypothetical protein | | | |
| 4709 | yycA Glycosyl transferase, family 39 | YycA [Bacillus licheniformis DSM 13] | UniRef100_Q65D42 | Bacillus licheniformis DSM 13 |
| 4710 | bceB bacitracine efflux ABC transport system | YtsD [Bacillus licheniformis DSM 13] | UniRef100_Q65D41 | Bacillus licheniformis DSM 13 |
| | permease | | | |
| 4711 | bceA ABC transporter, ATP_GTP-binding site motif A | YtsC [Bacillus licheniformis DSM 13] | UniRef100_Q65D40 | Bacillus licheniformis DSM 13 |
| | (P-loop) | | | |
| 4712 | bceS Histidine kinase, homodimeric | Histidine kinase, homodimeric [Bacillus licheniformis DSM 13] | UniRef100_Q62NL5 | Bacillus licheniformis DSM 13 |
| 4713 | bceR two-component response regulator | YtsA [Bacillus licheniformis DSM 13] | UniRef100_Q65D38 | Bacillus licheniformis DSM 13 |
| 4714 | bglH beta-glucosidase, Glycoside Hydrolase Family 1 | BglH [Bacillus licheniformis DSM 13] | UniRef100_Q65D37 | Bacillus licheniformis DSM 13 |
| 4715 | bglP phosphotransferase system (PTS) beta- | BglP (Phosphotransferase system (PTS) beta-glucoside- | UniRef100_Q65D36 | Bacillus licheniformis DSM 13 |
| | glucoside-specific enzyme IIBCA component | specific enzyme IIBCA component) [Bacillus licheniformis | | |
| | | DSM 13] | | |
| 4716 | yxeG YxeG | Hypothetical protein yxeG [Bacillus licheniformis DSM 13] | UniRef100_Q65D35 | Bacillus licheniformis DSM 13 |
| 4717 | yxeI Choloylglycine hydrolase | YxeI [Bacillus licheniformis DSM 13] | UniRef100_Q65D34 | Bacillus licheniformis DSM 13 |
| 4718 | BLP04529 hypothetical protein | | | |
| 4719 | BLP04530 hypothetical protein | Hypothetical protein [Bacillus licheniformis DSM 13] | UniRef100_Q65D33 | Bacillus licheniformis DSM 13 |
| 4720 | BLP04531 hypothetical protein | Hypothetical protein [Bacillus licheniformis DSM 13] | UniRef100_Q65D32 | Bacillus licheniformis DSM 13 |
| 4721 | yxiA Glycoside hydrolase, family 43 YxiA | YxiA [Bacillus licheniformis DSM 13] | UniRef100_Q65D31 | Bacillus licheniformis DSM 13 |
| 4722 | BLP04533 hypothetical protein | | | |
| 4723 | deaD ATP-dependent RNA helicase | DeaD [Bacillus licheniformis DSM 13] | UniRef100_Q65D30 | Bacillus licheniformis DSM 13 |
| 4724 | BLP04535 hypothetical protein | Hypothetical protein [Bacillus licheniformis DSM 13] | UniRef100_Q65D29 | Bacillus licheniformis DSM 13 |
| 4725 | BLP04536 hypothetical protein | Hypothetical protein [Bacillus licheniformis DSM 13] | UniRef100_Q65D28 | Bacillus licheniformis DSM 13 |
| 4726 | BLP04537 putative transposase protein | Hypothetical protein [Bacillus licheniformis DSM 13] | UniRef100_Q65D27 | Bacillus licheniformis DSM 13 |
| 4727 | BLP04538 hypothetical protein | Hypothetical protein [Bacillus licheniformis DSM 13] | UniRef100_Q65D26 | Bacillus licheniformis DSM 13 |
| 4728 | BLP04539 hypothetical protein | Hypothetical protein yxiB [Bacillus licheniformis DSM 13] | UniRef100_Q65D25 | Bacillus licheniformis DSM 13 |
| 4729 | pdp pyrimidine-nucleoside phosphorylase | Pdp [Bacillus licheniformis DSM 13] | UniRef100_Q65D24 | Bacillus licheniformis DSM 13 |
| 4730 | nupC pyrimidine-nucleoside transport protein | NupC [Bacillus licheniformis DSM 13] | UniRef100_Q65D23 | Bacillus licheniformis DSM 13 |
| 4731 | deoC deoxyribose-phosphate aldolase | Dra [Bacillus licheniformis DSM 13] | UniRef100_Q65D22 | Bacillus licheniformis DSM 13 |
| 4732 | deoR transcriptional regulator | DeoR [Bacillus licheniformis DSM 13] | UniRef100_Q65D21 | Bacillus licheniformis DSM 13 |
| 4733 | BLP04544 hypothetical protein | Hypothetical protein [Bacillus licheniformis DSM 13] | UniRef100_Q65D20 | Bacillus licheniformis DSM 13 |
| 4734 | ydaJ putative Glycoside transferase | YdaJ [Bacillus licheniformis DSM 13] | UniRef100_Q65D19 | Bacillus licheniformis DSM 13 |
| 4735 | ydaK conserved membrane protein YdaK | YdaK [Bacillus licheniformis DSM 13] | UniRef100_Q65D18 | Bacillus licheniformis DSM 13 |
| 4736 | ydaL YdaL | Hypothetical protein ydaL [Bacillus licheniformis DSM 13] | UniRef100_Q65D17 | Bacillus licheniformis DSM 13 |
| 4737 | ydaM Glycosyl transferase, family 2 | YdaM [Bacillus licheniformis DSM 13] | UniRef100_Q65D16 | Bacillus licheniformis DSM 13 |
| 4738 | ydaN putative cellulose synthase | Hypothetical protein ydaN [Bacillus licheniformis DSM 13] | UniRef100_Q65D15 | Bacillus licheniformis DSM 13 |
| 4739 | BLP04550 putative alanine transaminase | YwfG [Bacillus licheniformis DSM 13] | UniRef100_Q65D14 | Bacillus licheniformis DSM 13 |
| 4740 | BLP04551 hypothetical protein | Hypothetical protein [Bacillus licheniformis DSM 13] | UniRef100_Q65D13 | Bacillus licheniformis DSM 13 |
| 4741 | BLP04552 conserved hypothetical protein | Hypothetical protein ywfB [Bacillus licheniformis DSM 13] | UniRef100_Q65D12 | Bacillus licheniformis DSM 13 |
| 4742 | BLP04553 conserved hypothetical protein | Hypothetical protein ywfE [Bacillus licheniformis DSM 13] | UniRef100_Q65D11 | Bacillus licheniformis DSM 13 |
| 4743 | BLP04554 hypothetical protein, putative transporter | Hypothetical protein [Bacillus licheniformis DSM 13] | UniRef100_Q65D10 | Bacillus licheniformis DSM 13 |
| 4744 | fbaB fructose-1,6-bisphosphate aldolase | FbaB [Bacillus licheniformis DSM 13] | UniRef100_Q65D09 | Bacillus licheniformis DSM 13 |
| 4745 | iolI IolI | Hypothetical protein iolI [Bacillus licheniformis DSM 13] | UniRef100_Q65D08 | Bacillus licheniformis DSM 13 |
| 4746 | iolH IolH | Hypothetical protein iolH [Bacillus licheniformis DSM 13] | UniRef100_Q65D07 | Bacillus licheniformis DSM 13 |
| 4747 | idh myo-inositol 2-dehydrogenase | Idh [Bacillus licheniformis DSM 13] | UniRef100_Q65D06 | Bacillus licheniformis DSM 13 |
| 4748 | iolF inositol transport protein | IolF [Bacillus licheniformis DSM 13] | UniRef100_Q65D05 | Bacillus licheniformis DSM 13 |
| 4749 | iolE IolE | Hypothetical protein iolE [Bacillus licheniformis DSM 13] | UniRef100_Q65D04 | Bacillus licheniformis DSM 13 |
| 4750 | iolD IolD | Hypothetical protein iolD [Bacillus licheniformis DSM 13] | UniRef100_Q65D03 | Bacillus licheniformis DSM 13 |
| 4751 | iolC putative kinase, myo-inositol catabolism protein | Hypothetical protein iolC [Bacillus licheniformis DSM 13] | UniRef100_Q65D02 | Bacillus licheniformis DSM 13 |
| 4752 | iolB myo-inositol catabolism protein | Hypothetical protein iolB [Bacillus licheniformis DSM 13] | UniRef100_Q65D01 | Bacillus licheniformis DSM 13 |
| 4753 | iolA methylmalonate-semialdehyde dehydrogenase | Hypothetical protein [Bacillus licheniformis DSM 13] | UniRef100_Q65D00 | Bacillus licheniformis DSM 13 |
| 4754 | BLP04565 hypothetical protein | | | |
| 4755 | iolR transcriptional regulator (DeoR family) | iolR [Bacillus licheniformis DSM 13] | UniRef100_Q65CZ9 | Bacillus licheniformis DSM 13 |
| 4756 | iolS aldo_keto reductase family 2 protein | Hypothetical protein iolS [Bacillus licheniformis DSM 13] | UniRef100_Q65CZ8 | Bacillus licheniformis DSM 13 |
| 4757 | glpQ glycerophosphoryl diester phosphodiesterase | GlpQ [Bacillus licheniformis DSM 13] | UniRef100_Q65CZ7 | Bacillus licheniformis DSM 13 |
| 4758 | glpT glycerol-3-phosphate permease | GlpT [Bacillus licheniformis DSM 13] | UniRef100_Q65CZ6 | Bacillus licheniformis DSM 13 |
| 4759 | htpG class III heat-shock protein (molecular | HtpG [Bacillus licheniformis DSM 13] | UniRef100_Q65CZ5 | Bacillus licheniformis DSM 13 |
| | chaperone) | | | |
| 4760 | BLP04571 ABC transport system ATP-binding protein | Hypothetical protein [Bacillus licheniformis DSM 13] | UniRef100_Q65CZ4 | Bacillus licheniformis DSM 13 |
| 4761 | yxeH HAD-superfamily hydrolase YxeH | YxeH [Bacillus licheniformis DSM 13] | UniRef100_Q65CZ3 | Bacillus licheniformis DSM 13 |
| 4762 | BLP04573 putative Glycerol dehydrogenase | Hypothetical protein [Bacillus licheniformis DSM 13] | UniRef100_Q65CZ2 | Bacillus licheniformis DSM 13 |
| 4763 | BLP04574 putative D-alpha-glycerophosphatase | YkrX (HAD-superfamily hydrolase, subfamily IB (PSPase- | UniRef100_Q65CZ1 | Bacillus licheniformis DSM 13 |
| | | like), HAD- superfamily subfamily IB hydrolase, hypothetical 1) | | |
| | | [Bacillus licheniformis DSM 13] | | |
| 4764 | BLP04575 conserved hypothetical protein | Hypothetical protein [Bacillus licheniformis DSM 13] | UniRef100_Q65CZ0 | Bacillus licheniformis DSM 13 |
| 4765 | yxeB Periplasmic binding protein YxeB | YxeB [Bacillus licheniformis DSM 13] | UniRef100_Q65CY9 | Bacillus licheniformis DSM 13 |
| 4766 | BLP04577 hypothetical protein | Hypothetical protein [Bacillus licheniformis DSM 13] | UniRef100_Q65CY8 | Bacillus licheniformis DSM 13 |
| 4767 | BLP04578 hypothetical protein | | | |
| 4768 | BLP04579 Glyoxalase I | YraH [Bacillus licheniformis DSM 13] | UniRef100_Q65CY7 | Bacillus licheniformis DSM 13 |
| 4769 | BLP04580 hypothetical protein | Hypothetical protein [Bacillus licheniformis DSM 13] | UniRef100_Q62NG2 | Bacillus licheniformis DSM 13 |
| 4770 | BLP04581 ferrous ion transporter | Hypothetical Ferrous iron transport protein B [Bacillus | UniRef100_Q65CY6 | Bacillus licheniformis DSM 13 |
| | | licheniformis DSM 13] | | |
| 4771 | BLP04582 transcriptional repressor | Hypothetical protein [Bacillus licheniformis DSM 13] | UniRef100_Q65CY5 | Bacillus licheniformis DSM 13 |
| 4772 | yfiQ putative Acyltransferase 3 YfiQ | YfiQ [Bacillus licheniformis DSM 13] | UniRef100_Q65CY4 | Bacillus licheniformis DSM 13 |
| 4773 | yxdM ABC transport system permease protein | Hypothetical protein yxdM [Bacillus licheniformis DSM 13] | UniRef100_Q65CY3 | Bacillus licheniformis DSM 13 |
| 4774 | yxdL ABC transporter | Hypothetical protein [Bacillus licheniformis DSM 13] | UniRef100_Q65CY2 | Bacillus licheniformis DSM 13 |
| 4775 | yxdK two-component sensor histidine kinase, | Hypothetical protein [Bacillus licheniformis DSM 13] | UniRef100_Q65CY1 | Bacillus licheniformis DSM 13 |
| | potential cognate response regulator is YxdJ | | | |
| 4776 | yxdJ two-component response regulator, potential | YxdJ [Bacillus licheniformis DSM 13] | UniRef100_Q65CY0 | Bacillus licheniformis DSM 13 |
| | cognate sensor kinase is YxdK | | | |
| 4777 | yxeA conserved hypothetical protein | Hypothetical protein yxeA [Bacillus licheniformis DSM 13] | UniRef100_Q65CX9 | Bacillus licheniformis DSM 13 |
| 4778 | yoaH putative methyl-accepting chemotaxis protein | YoaH [Bacillus licheniformis DSM 13] | UniRef100_Q65CX8 | Bacillus licheniformis DSM 13 |
| | YoaH | | | |
| 4779 | BLP04590 putative alanine:Na symporter | Hypothetical protein [Bacillus licheniformis DSM 13] | UniRef100_Q65CX7 | Bacillus licheniformis DSM 13 |
| 4780 | aldA alanine dehydrogenase (stage V sporulation | Hypothetical protein [Bacillus licheniformis DSM 13] | UniRef100_Q65CX6 | Bacillus licheniformis DSM 13 |
| | protein N) | | | |
| 4781 | yvfO Glyccosyl Hydrolase Family 53 | Hypothetical protein yvfO [Bacillus licheniformis DSM 13] | UniRef100_Q62NF0 | Bacillus licheniformis DSM 13 |
| 4782 | lacA Glycoside Hydrolase Family 42 | LacA [Bacillus licheniformis DSM 13] | UniRef100_Q65CX4 | Bacillus licheniformis DSM 13 |
| 4783 | yvfM Binding-protein-dependent transport system, | YvfM [Bacillus licheniformis DSM 13] | UniRef100_Q65CX3 | Bacillus licheniformis DSM 13 |
| | inner membrane component protein | | | |
| 4784 | yvfL Binding-protein-dependent transport systems | YvfL [Bacillus licheniformis DSM 13] | UniRef100_Q65CX2 | Bacillus licheniformis DSM 13 |
| | inner membrane component | | | |
| 4785 | cycB putative extracellular solute-binding protein, | YvfK [Bacillus licheniformis DSM 13] | UniRef100_Q65CX1 | Bacillus licheniformis DSM 13 |
| | family 1 CycB | | | |
| 4786 | BLP04597 hypothetical protein | | | |
| 4787 | lacR transcriptional regulator LacR | LacR [Bacillus licheniformis DSM 13] | UniRef100_Q65CX0 | Bacillus licheniformis DSM 13 |
| 4788 | galK galactokinase | GalK [Bacillus licheniformis DSM 13] | UniRef100_Q65CW9 | Bacillus licheniformis DSM 13 |
| 4789 | galE UDP-glucose 4-epimerase | Hypothetical protein [Bacillus licheniformis DSM 13] | UniRef100_Q65CW8 | Bacillus licheniformis DSM 13 |
| 4790 | galT galactose-1-phosphate uridyltransferase | GalT [Bacillus licheniformis DSM 13] | UniRef100_Q65CW7 | Bacillus licheniformis DSM 13 |
| 4791 | xylR transcriptional regulator | Hypothetical protein [Bacillus licheniformis DSM 13] | UniRef100_Q65CW6 | Bacillus licheniformis DSM 13 |
| 4792 | BLP04603 hypothetical protein | | | |
| 4793 | gntR transcriptional regulator | GntR family [Bacillus licheniformis DSM 13] | UniRef100_Q65CW5 | Bacillus licheniformis DSM 13 |
| 4794 | gntK gluconate kinase | GntK [Bacillus licheniformis DSM 13] | UniRef100_Q65CW4 | Bacillus licheniformis DSM 13 |
| 4795 | gntP gluconate permease | GntP [Bacillus licheniformis DSM 13] | UniRef100_Q65CW3 | Bacillus licheniformis DSM 13 |
| 4796 | gntZ 6-phosphogluconate dehydrogenase | GntZ [Bacillus licheniformis DSM 13] | UniRef100_Q65CW2 | Bacillus licheniformis DSM 13 |
| 4797 | BLP04608 hypothetical protein | | | |
| 4798 | BLP04609 putative Aldehyde-alcohol dehydrogenase | Hypothetical protein [Bacillus licheniformis DSM 13] | UniRef100_Q65CW1 | Bacillus licheniformis DSM 13 |
| 4799 | ahpC alkyl hydroperoxide reductase (small subunit) | AhpC [Bacillus licheniformis DSM 13] | UniRef100_Q65CW0 | Bacillus licheniformis DSM 13 |
| 4800 | ahpF alkyl hydroperoxide reductase (large subunit) | AhpF (Alkyl hydroperoxide reductase (Large subunit) and | UniRef100_Q65CV9 | Bacillus licheniformis DSM 13 |
| | and NADH dehydrogenase | NADH dehydrogenase) [Bacillus licheniformis DSM 13] | | |
| 4801 | BLP04612 hypothetical protein | Hypothetical protein [Bacillus licheniformis DSM 13] | UniRef100_Q65CV8 | Bacillus licheniformis DSM 13 |
| 4802 | BLP04613 hypothetical protein | Hypothetical protein [Bacillus licheniformis DSM 13] | UniRef100_Q65CV7 | Bacillus licheniformis DSM 13 |
| 4803 | abiBL11 AbiBL11 | AbiBL11 [Bacillus licheniformis] | UniRef100_Q9F5X7 | Bacillus licheniformis |
| 4804 | BLP04615 highly conserved hypothetical protein | Hypothetical protein [Bacillus licheniformis] | UniRef100_Q9F5X6 | Bacillus licheniformis |
| 4805 | yvfR ABC transporter | YvfR [Bacillus licheniformis DSM 13] | UniRef100_Q65CV3 | Bacillus licheniformis DSM 13 |
| 4806 | yvfS conserved hypothetical protein YvfS | Hypothetical protein yvfS [Bacillus subtilis] | UniRef100_O07017 | Bacillus subtilis |
| 4807 | desK two-component sensor histidine kinase | Hypothetical ATP-binding region, ATPase-like [Bacillus | UniRef100_Q62NC9 | Bacillus licheniformis DSM 13 |
| | esponsible for cold induction of the des gene | licheniformis DSM 13] | | |
| 4808 | yvfU CheY-like | Response regulator [Bacillus licheniformis] | UniRef100_Q65CU8 | Bacillus licheniformis |
| 4809 | BLP04620 hypothetical protein | Hypothetical protein [Bacillus licheniformis DSM 13] | UniRef100_Q62NC7 | Bacillus licheniformis DSM 13 |
| 4810 | BLP04621 hypothetical protein | Hypothetical protein [Bacillus licheniformis DSM 13] | UniRef100_Q65CU6 | Bacillus licheniformis DSM 13 |
| 4811 | BLP04622 ABC-type antimicrobial peptide transport | Hypothetical protein [Bacillus licheniformis DSM 13] | UniRef100_Q65CU5 | Bacillus licheniformis DSM 13 |
| | system ATPase component | | | |
| 4812 | BLP04805 hypothetical protein | | | |
| 4813 | BLP04836 L12 L12 | Hypothetical protein [Bacillus licheniformis DSM 13] | UniRef100_Q65CU4 | Bacillus licheniformis DSM 13 |
| 4814 | BLP04806 hypothetical protein | | | |
| 4815 | BLP04623 hypothetical protein | Hypothetical protein [Bacillus licheniformis DSM 13] | UniRef100_Q65CU3 | Bacillus licheniformis DSM 13 |
| 4816 | BLP04624 hypothetical protein | Hypothetical protein [Bacillus licheniformis DSM 13] | UniRef100_Q62NC2 | Bacillus licheniformis DSM 13 |
| 4817 | yydA conserved hypothetical protein containing | Hypothetical protein yydA [Bacillus licheniformis DSM 13] | UniRef100_Q65CS8 | Bacillus licheniformis DSM 13 |
| | DUF163 domain YydA | | | |
| 4818 | BLP04626 conserved hypothetical protein | Hypothetical protein [Bacillus licheniformis DSM 13] | UniRef100_Q65CS7 | Bacillus licheniformis DSM 13 |
| 4819 | BLP04627 conserved hypothetical protein | Hypothetical protein [Bacillus licheniformis DSM 13] | UniRef100_Q65CS6 | Bacillus licheniformis DSM 13 |
| 4820 | yycN GCN5-related N-acetyltransferase | GCN5-related N-acetyltransferase [Bacillus licheniformis DSM | UniRef100_Q62NA3 | Bacillus licheniformis DSM 13 |
| | | 13] | | |
| 4821 | BLP04629 conserved hypothetical protein | Hypothetical protein [Bacillus licheniformis DSM 13] | UniRef100_Q65CS4 | Bacillus licheniformis DSM 13 |
| 4822 | BLP04630 putative Molybdate_tungstate binding | Hypothetical Molybdate/tungstate binding protein, MOP | UniRef100_Q65CS3 | Bacillus licheniformis DSM 13 |
| | protein | [Bacillus licheniformis DSM 13] | | |
| 4823 | BLP04631 hypothetical protein | | | |
| 4824 | yyxA putative serine protease YyxA | YyxA [Bacillus licheniformis DSM 13] | UniRef100_Q65CS2 | Bacillus licheniformis DSM 13 |
| 4825 | yycJ conserved hypothetical protein YycJ | YycJ [Bacillus licheniformis DSM 13] | UniRef100_Q65CS1 | Bacillus licheniformis DSM 13 |
| 4826 | yycI putative extracytoplasmic proein YycI | Hypothetical protein yycI [Bacillus licheniformis DSM 13] | UniRef100_Q65CS0 | Bacillus licheniformis DSM 13 |
| 4827 | yycH conserved protein YycH | YycH [Bacillus licheniformis DSM 13] | UniRef100_Q65CR9 | Bacillus licheniformis DSM 13 |
| 4828 | yycG two-component sensor histidine kinase | YycG [Bacillus licheniformis DSM 13] | UniRef100_Q65CR8 | Bacillus licheniformis DSM 13 |
| 4829 | yycF putative two-component response regulator | YycF [Bacillus licheniformis DSM 13] | UniRef100_Q65CR7 | Bacillus licheniformis DSM 13 |
| | YycF | | | |
| 4830 | BLP04638 hypothetical protein | | | |
| 4831 | BLP04639 putative Phosphohydrolase | Hypothetical protein [Bacillus licheniformis DSM 13] | UniRef100_Q65CR6 | Bacillus licheniformis DSM 13 |
| 4832 | purA adenylosuccinate synthetase | PurA [Bacillus licheniformis DSM 13] | UniRef100_Q65CR5 | Bacillus licheniformis DSM 13 |
| 4833 | BLP04641 hypothetical protein | | | |
| 4834 | BLP04642 conserved hypothetical protein | Hypothetical protein [Bacillus licheniformis DSM 13] | UniRef100_Q65CR4 | Bacillus licheniformis DSM 13 |
| 4835 | dnaC replicative DNA helicase | DnaC [Bacillus licheniformis DSM 13] | UniRef100_Q65CR3 | Bacillus licheniformis DSM 13 |
| 4836 | yycD YycD | Hypothetical protein yycD [Bacillus licheniformis DSM 13] | UniRef100_Q65CR2 | Bacillus licheniformis DSM 13 |
| 4837 | yyzB YyzB | Hypothetical protein yyzB [Bacillus licheniformis DSM 13] | UniRef100_Q65CR1 | Bacillus licheniformis DSM 13 |
| 4838 | yycC conserved hypothetical protein YycC | YycC [Bacillus licheniformis DSM 13] | UniRef100_Q65CR0 | Bacillus licheniformis DSM 13 |
| 4839 | yycB Cyanate transport system protein | YycB [Bacillus licheniformis DSM 13] | UniRef100_Q65CQ9 | Bacillus licheniformis DSM 13 |
| 4840 | nagA N-acetylglucosamine-6-phosphate deacetylase | NagA [Bacillus licheniformis DSM 13] | UniRef100_Q65CQ8 | Bacillus licheniformis DSM 13 |
| | (Carbohydrate esterase Family 9) | | | |
| 4841 | nagB N-acetylglucosamine-6-phosphate isomerase | Hypothetical protein [Bacillus licheniformis DSM 13] | UniRef100_Q65CQ7 | Bacillus licheniformis DSM 13 |
| 4842 | yvoA putative transcriptional regulator (GntR family) | YvoA [Bacillus licheniformis DSM 13] | UniRef100_Q65CQ6 | Bacillus licheniformis DSM 13 |
| | YvoA | | | |
| 4843 | BLP04651 conserved hypothetical protein | Hypothetical protein [Bacillus licheniformis DSM 13] | UniRef100_Q65CQ5 | Bacillus licheniformis DSM 13 |
| 4844 | nagP phosphotransferase system (PTS) N- | NagP (Phosphotransferase system (PTS) N- | UniRef100_Q65CQ4 | Bacillus licheniformis DSM 13 |
| | acetylglucosamine-specific enzyme IICB component | acetylglucosamine-specific enzyme IICB component) [Bacillus | | |
| | | licheniformis DSM 13] | | |
| 4845 | rplI ribosomal protein L9 | RplI [Bacillus licheniformis DSM 13] | UniRef100_Q65CQ3 | Bacillus licheniformis DSM 13 |
| 4846 | yybT putative phosphoesterase family protein YybT | YybT [Bacillus licheniformis DSM 13] | UniRef100_Q65CQ2 | Bacillus licheniformis DSM 13 |
| 4847 | yybS conserved hypothetical protein YybS | Hypothetical protein yybS [Bacillus licheniformis DSM 13] | UniRef100_Q65CQ1 | Bacillus licheniformis DSM 13 |
| 4848 | BLP04661 hypothetical protein | | | |
| 4849 | cotF2 spore coat protein CotF2 | | | |
| 4850 | cotF spore coat protein F | CotF [Bacillus licheniformis DSM 13] | UniRef100_Q65CP9 | Bacillus licheniformis DSM 13 |
| 4851 | yxiE conserved protein containing universal stress | YxiE [Bacillus licheniformis DSM 13] | UniRef100_Q65CP8 | Bacillus licheniformis DSM 13 |
| | protein domain YxiE | | | |
| 4852 | ybaR putative Sulfate transporter_antisigma-factor | YbaR [Bacillus licheniformis DSM 13] | UniRef100_Q65CP7 | Bacillus licheniformis DSM 13 |
| | antagonist YbaR | | | |
| 4853 | yybO Major facilitator superfamily | YybO [Bacillus licheniformis DSM 13] | UniRef100_Q65CP6 | Bacillus licheniformis DSM 13 |
| 4854 | BLP04661 hypothetical protein | | | |
| 4855 | rpsR 30S ribosomal protein RpsR | RpsR [Bacillus licheniformis DSM 13] | UniRef100_Q65CP5 | Bacillus licheniformis DSM 13 |
| 4856 | ssb single-strand DNA-binding protein | Ssb [Bacillus licheniformis DSM 13] | UniRef100_Q65CP4 | Bacillus licheniformis DSM 13 |
| 4857 | rpsF ribosomal protein S6 (BS9) | RpsF [Bacillus licheniformis DSM 13] | UniRef100_Q65CP3 | Bacillus licheniformis DSM 13 |
| 4858 | engD GTP-dependent nucleic acid-binding protein | YyaF [Bacillus licheniformis DSM 13] | UniRef100_Q65CP2 | Bacillus licheniformis DSM 13 |
| | EngD | | | |
| 4859 | BLP04665 hypothetical protein | | | |
| 4860 | BLP04666 conserved hypothetical protein containing | Hypothetical protein [Bacillus licheniformis DSM 13] | UniRef100_Q65CP1 | Bacillus licheniformis DSM 13 |
| | domain DUF951 | | | |
| 4861 | yyaD conserved hypothetical membrane protein YyaD | Hypothetical protein yyaD [Bacillus licheniformis DSM 13] | UniRef100_Q65CP0 | Bacillus licheniformis DSM 13 |
| 4862 | BLP04808 hypothetical protein | | | |
| 4863 | yyaC conserved hypothetical protein containing | Hypothetical protein yyaC [Bacillus licheniformis DSM 13] | UniRef100_Q65CN9 | Bacillus licheniformis DSM 13 |
| | domain DUF1256 | | | |
| 4864 | spo0J Stage 0 sporulation protein J | Spo0J [Bacillus licheniformis DSM 13] | UniRef100_Q65CN8 | Bacillus licheniformis DSM 13 |
| 4865 | soj chromosome partitioning protein transcriptional | Chromosome partitioning protein transcriptional regulator | UniRef100_Q62N66 | Bacillus licheniformis DSM 13 |
| | regulator | [Bacillus licheniformis DSM 13] | | |
| 4866 | ydfG conserved hypothetical protein containing | YdfG [Bacillus licheniformis DSM 13] | UniRef100_Q65CN6 | Bacillus licheniformis DSM 13 |
| | Alkylhydroperoxidase AhpD core domain YdfG | | | |
| 4867 | BLP04672 putative RNA polymerase, ECF sigma | Hypothetical protein [Bacillus licheniformis DSM 13] | UniRef100_Q65CN5 | Bacillus licheniformis DSM 13 |
| | subunit | | | |
| 4868 | yyaA putative DNA binding partioning protein | YyaA [Bacillus licheniformis DSM 13] | UniRef100_Q65CN4 | Bacillus licheniformis DSM 13 |
| 4869 | gidB glucose-inhibited division protein | GidB [Bacillus licheniformis DSM 13] | UniRef100_Q65CN3 | Bacillus licheniformis DSM 13 |
| 4870 | gidA glucose-inhibited division protein | GidA [Bacillus licheniformis DSM 13] | UniRef100_Q65CN2 | Bacillus licheniformis DSM 13 |
| 4871 | thdF ThdF protein —tRNA modification | Hypothetical protein thdF [Bacillus licheniformis DSM 13] | UniRef100_Q65CN1 | Bacillus licheniformis DSM 13 |
| 4872 | BLP04677 hypothetical protein | | | |
| 4873 | jag SpoIIIJ-associated protein | Jag [Bacillus licheniformis DSM 13] | UniRef100_Q65CN0 | Bacillus licheniformis DSM 13 |
| 4874 | spoIIIJ SpoIIIJ protein involved in stage III sporulation | SpoIIIJ [Bacillus licheniformis DSM 13] | UniRef100_Q65CM9 | Bacillus licheniformis DSM 13 |
| 4875 | mpA protein component of ribonuclease P (RNase P) | RnpA [Bacillus licheniformis DSM 13] | UniRef100_Q65CM8 | Bacillus licheniformis DSM 13 |
| | (substrate specificity) | | | |
| 4876 | rpmH ribosomal protein L34 | 50S ribosomal protein L34 [Bacillus subtilis] | UniRef100_P05647 | Bacillus subtilis |

TABLE 2
Features of the Bacillus licheniformis SJ1904 genome and comparison
with genome of Bacillus licheniformis ATCC 14580

| | B. licheniformis | B. licheniformis |
|---|---|---|
| Properties | SJ1904 | ATCC 14580 |
| Total base pairs | 4,345,159 | 4,222,336 |
| Gene models w/o frameshifts | 4,707 | 4,208 |
| Gene models partial or | 168 | 45 |
| w/confirmed frameshifts | | |
| rRNA operons | 7 | 7 |
| tRNA genes | 72 | 72 |
| Avg G + C content | 46.7% | 46.2% |
| Avg gene length | 789 bp | 873 bp |
| Gene density | 1.12 genes/kb | 0.98 genes/kb |

TABLE 3
Features of the Bacillus licheniformis SJ1904 not predicted in Bacillus
licheniformis ATCC 14580

| SEQ | | |
|---|---|---|
| ID | Gene Name | Gene Product |
| 50 | BLP04682 | BLP04682 hypothetical protein |
| 55 | BLP00052 | BLP00052 hypothetical protein |
| 77 | BLP00074 | BLP00074 hypothetical protein |
| 82 | BLP04683 | BLP04683 hypothetical protein |
| 91 | BLP00087 | BLP00087 hypothetical protein |
| 98 | BLP00094 | BLP00094 hypothetical protein |
| 103 | BLP04684 | BLP04684 hypothetical protein |
| 125 | BLP04685 | BLP04685 hypothetical protein |
| 169 | BLP00152 | BLP00152 Putative transcriptional regulator |
| 171 | BLP00154 | BLP00154 conserved hypothetical protein |
| 172 | BLP00155 | BLP00155 putative phage protein |
| 174 | BLP04687 | BLP04687 hypothetical protein |
| 177 | BLP00158 | BLP00158 conserved hypothetical phage protein |
| 178 | BLP00159 | BLP00159 conserved hypothetical phage protein |
| 179 | BLP00160 | BLP00160 hypothetical protein |
| 180 | BLP04686 | BLP04686 hypothetical protein |
| 181 | BLP00161 | BLP00161 hypothetical protein |
| 182 | BLP00162 | BLP00162 conserved hypothetical phage protein |
| 185 | BLP00166 | BLP00166 conserved hypothetical protein |
| 186 | BLP00167 | BLP00167 conserved hypothetical protein |
| 187 | BLP00168 | BLP00168 hypothetical protein |
| 192 | BLP00173 | BLP00173 hypothetical protein |
| 194 | BLP00175 | BLP00175 hypothetical protein |
| 195 | BLP00176 | BLP00175 hypothetical protein |
| 196 | BLP00177 | BLP00177 hypothetical protein |
| 198 | BLP04690 | BLP04690 hypothetical protein |
| 199 | BLP00179 | BLP00179 conserved hypothetical protein |
| 203 | BLP00183 | BLP00183 hypothetical protein |
| 205 | BLP00185 | BLP00185 putative phage terminase, large subunit, |
| | | PBSX family |
| 206 | BLP00186 | BLP00186 hypothetical protein |
| 207 | BLP00187 | BLP00187 putative Phage portal protein, A118 |
| | | family |
| 208 | BLP00189 | BLP00189 putative Gp4-like protein |
| 209 | BLP00190 | BLP00190 hypothetical protein |
| 210 | BLP00191 | BLP00191 hypothetical protein |
| 211 | BLP00192 | BLP00192 conserved hypothetical phage protein |
| 212 | BLP00193 | BLP00193 conserved hypothetical phage-like |
| | | protein |
| 213 | BLP00194 | BLP00194 conserved phage protein |
| 214 | BLP00195 | BLP00195 conserved phage protein |
| 215 | BLP00196 | BLP00196 conserved phage protein |
| 216 | BLP04843 | BLP04843 conserved hypothetical phage protein |
| 217 | BLP00197 | BLP00197 hypothetical protein |
| 218 | BLP00198 | BLP00198 hypothetical protein |
| 219 | BLP04691 | BLP04691 hypothetical protein |
| 220 | BLP00199 | BLP00199 hypothetical protein |
| 221 | BLP00200 | BLP00200 hypothetical protein |
| 225 | BLP00205 | BLP00205 hypothetical protein |
| 226 | BLP00206 | BLP00206 hypothetical protein |
| 227 | BLP00207 | BLP00207 hypothetical protein |
| 228 | BLP00208 | BLP00208 hypothetical protein |
| 229 | BLP00209 | BLP00209 hypothetical protein |
| 230 | BLP00210 | BLP00210 hypothetical protein |
| 241 | BLP00220 | BLP00220 hypothetical protein |
| 243 | BLP00222 | BLP00222 hypothetical protein |
| 244 | BLP04911 | BLP04911 conserved hyopothetical protein |
| 245 | BLP04912 | BLP04912 hypothetical protein |
| 246 | BLP04693 | BLP04693 hypothetical protein |
| 247 | BLP04913 | BLP04913 hypothetical protein |
| 248 | BLP00223 | BLP00223 hypothetical protein |
| 249 | BLP04914 | BLP04914 hypothetical protein |
| 250 | BLP00224 | BLP00224 hypothetical protein |
| 251 | BLP04915 | BLP04915 hypothetical protein |
| 252 | BLP00225 | BLP00225 hypothetical protein |
| 253 | BLP04916 | BLP04916 hypothetical protein |
| 254 | BLP00226 | BLP00226 hypothetical protein |
| 255 | BLP00227 | BLP00227 hypothetical protein |
| 256 | BLP04917 | BLP04917 hypothetical protein |
| 257 | BLP04918 | BLP04918 hypothetical protein |
| 258 | BLP00228 | BLP00228 hypothetical protein |
| 259 | BLP04694 | BLP04694 hypothetical protein |
| 260 | BLP00229 | BLP00229 hypothetical protein |
| 263 | BLP00231 | BLP00231 hypothetical protein |
| 264 | BLP00232 | BLP00232 hypothetical protein |
| 265 | BLP00233 | BLP00233 hypothetical protein |
| 266 | BLP04695 | BLP04695 hypothetical protein |
| 287 | BLP00254 | BLP00254 hypothetical protein |
| 306 | BLP00272 | BLP00272 hypothetical protein |
| 308 | BLP00274 | BLP00274 hypothetical protein |
| 323 | BLP04697 | BLP04697 hypothetical protein |
| 350 | BLP00315 | BLP00315 hypothetical protein |
| 354 | BLP00319 | BLP00319 hypothetical protein |
| 360 | BLP00325 | BLP00325 hypothetical protein |
| 363 | BLP00328 | BLP00328 hypothetical protein |
| 367 | BLP00332 | BLP00332 hypothetical protein |
| 381 | BLP00347 | BLP00347 hypothetical protein |
| 445 | BLP00411 | BLP00411 conserved hypothetical protein |
| 469 | BLP00435 | BLP00435 hypothetical protein |
| 487 | BLP00453 | BLP00453 hypothetical protein |
| 488 | BLP04698 | BLP04698 hypothetical protein |
| 516 | BLP00481 | BLP00481 hypothetical protein |
| 523 | BLP00488 | BLP00488 conserved hypothetical protein |
| 524 | BLP00489 | BLP00489 hypothetical protein |
| 537 | BLP00502 | BLP00502 hypothetical protein |
| 541 | BLP00506 | BLP00506 conserved hypothetical protein |
| 575 | BLP00538 | BLP00538 hypothetical protein |
| 592 | BLP00554 | BLP00554 hypothetical protein |
| 607 | BLP00569 | BLP00569 hypothetical protein |
| 621 | BLP00582 | BLP00582 hypothetical protein |
| 627 | BLP04701 | BLP04701 hypothetical protein |
| 628 | BLP00588 | BLP00588 hypothetical protein |
| 666 | BLP04703 | BLP04703 hypothetical protein |
| 672 | BLP00631 | BLP00631 hypothetical protein |
| 688 | BLP04706 | BLP04706 hypothetical protein |
| 691 | BLP00650 | BLP00650 hypothetical protein |
| 702 | BLP00661 | BLP00661 hypothetical protein |
| 710 | BLP00669 | BLP00669 hypothetical protein |
| 719 | BLP04707 | BLP04707 hypothetical protein |
| 726 | BLP00683 | BLP00683 hypothetical protein |
| 748 | BLP00705 | BLP00705 hypothetical protein |
| 751 | BLP00708 | BLP00708 hypothetical protein |
| 773 | BLP00731 | BLP00731 conserved hypothetical protein |
| 774 | BLP00732 | BLP00732 hypothetical protein |
| 777 | BLP00735 | BLP00735 hypothetical protein |
| 791 | BLP00749 | BLP00749 hypothetical protein |
| 831 | BLP00787 | BLP00787 hypothetical protein |
| 833 | BLP00789 | BLP00789 hypothetical protein |
| 842 | BLP00798 | BLP00798 conserved hypothetical protein |
| 847 | BLP00803 | BLP00803 hypothetical protein |
| 855 | BLP04709 | BLP04709 hypothetical protein |
| 857 | BLP00812 | BLP00812 hypothetical protein |
| 885 | BLP00840 | BLP00840 Putative Type IIc bacteriocin lichenein |
| 887 | BLP00842 | BLP00842 ABC transporter, permease subunit |
| 901 | BLP00856 | BLP00856 hypothetical protein |
| 944 | BLP00900 | BLP00900 conserved hypothetical protein |
| 982 | BLP00938 | BLP00938 hypothetical protein |
| 991 | BLP00947 | BLP00947 hypothetical protein |
| 994 | BLP00950 | BLP00950 hypothetical protein |
| 1018 | BLP00973 | BLP00973 hypothetical protein |
| 1032 | BLP00985 | BLP00985 hypothetical protein |
| 1034 | BLP00987 | BLP00987 hypothetical protein |
| 1058 | BLP01011 | BLP01011 hypothetical protein |
| 1078 | BLP01032 | BLP01032 hypothetical protein |
| 1088 | BLP04710 | BLP04710 hypothetical protein |
| 1098 | BLP01051 | BLP01051 hypothetical protein |
| 1108 | BLP04711 | BLP04711 hypothetical protein |
| 1112 | BLP04712 | BLP04712 hypothetical protein |
| 1128 | BLP01079 | BLP01079 hypothetical protein |
| 1148 | BLP01099 | BLP01099 hypothetical protein |
| 1153 | BLP01105 | BLP01105 hypothetical protein |
| 1154 | BLP01106 | BLP01106 hypothetical protein |
| 1158 | BLP01110 | BLP01110 hypothetical protein |
| 1160 | BLP01112 | BLP01112 hypothetical protein |
| 1164 | BLP01116 | BLP01116 hypothetical protein |
| 1175 | BLP01127 | BLP01127 hypothetical protein |
| 1176 | BLP04814 | BLP04814 unassigned |
| 1177 | BLP01128 | BLP01128 hypothetical protein |
| 1180 | BLP01131 | BLP01131 hypothetical protein |
| 1183 | BLP01134 | BLP01134 hypothetical protein |
| 1184 | BLP01135 | BLP01135 conserved hypothetical protein |
| 1193 | BLP04850 | BLP04850 conserved hypothetical protein |
| 1194 | BLP01144 | BLP01144 conserved hypothetical protein |
| 1199 | BLP01149 | BLP01149 conserved hypothetical protein |
| 1237 | BLP01185 | BLP01185 hypothetical protein |
| 1244 | BLP04714 | BLP04714 hypothetical protein |
| 1262 | BLP01209 | BLP01209 hypothetical protein |
| 1263 | BLP04715 | BLP04715 hypothetical protein |
| 1265 | BLP01210 | BLP01210 hypothetical protein |
| 1266 | BLP01211 | BLP01211 hypothetical protein |
| 1302 | BLP01246 | BLP01246 hypothetical protein |
| 1313 | BLP01257 | BLP01257 hypothetical protein |
| 1314 | BLP01258 | BLP01258 hypothetical protein |
| 1315 | BLP01259 | BLP01259 hypothetical protein |
| 1316 | BLP01260 | BLP01260 hypothetical protein |
| 1318 | BLP01262 | BLP01262 hypothetical protein |
| 1345 | BLP01290 | BLP01290 hypothetical protein |
| 1355 | BLP01300 | BLP01300 hypothetical protein |
| 1373 | BLP01318 | BLP01318 hypothetical protein |
| 1374 | BLP01319 | BLP01319 hypothetical protein |
| 1401 | BLP04717 | BLP04717 hypothetical protein |
| 1424 | BLP01368 | BLP01368 hypothetical protein |
| 1432 | BLP04816 | BLP04816 conserved hypothetical protein |
| 1433 | BLP01376 | BLP01376 hypothetical protein |
| 1440 | BLP01383 | BLP01383 conserved hypothetical protein |
| 1442 | BLP04719 | BLP04719 hypothetical protein |
| 1448 | BLP01390 | BLP01390 hypothetical protein |
| 1455 | BLP04720 | BLP04720 hypothetical protein |
| 1470 | BLP01410 | BLP01410 conserved hypothetical |
| 1509 | BLP01451 | BLP01451 hypothetical protein |
| 1527 | BLP01469 | BLP01469 hypothetical protein |
| 1539 | BLP01481 | BLP01481 hypothetical protein |
| 1556 | BLP04721 | BLP04721 hypothetical protein |
| 1565 | BLP01506 | BLP01506 hypothetical protein |
| 1589 | BLP01530 | BLP01530 hypothetical protein |
| 1619 | BLP01561 | BLP01561 hypothetical protein |
| 1634 | BLP01575 | BLP01575 hypothetical protein |
| 1635 | BLP01576 | BLP01576 hypothetical protein |
| 1636 | BLP04851 | BLP04851 conserved hypothetical protein |
| 1638 | BLP04852 | BLP04852 hypothetical protein |
| 1639 | BLP01578 | BLP01578 hypothetical protein |
| 1640 | BLP04853 | BLP04853 hypothetical protein |
| 1641 | BLP04722 | BLP04722 hypothetical protein |
| 1642 | BLP01579 | BLP01579 hypothetical protein |
| 1643 | BLP04854 | BLP04854 hypothetical protein |
| 1644 | BLP04855 | BLP04855 hypothetical protein |
| 1645 | BLP04724 | BLP04724 hypothetical protein |
| 1646 | BLP01580 | BLP01580 hypothetical protein |
| 1647 | BLP01581 | BLP01581 hypothetical protein |
| 1649 | BLP04856 | BLP04856 hypothetical protein |
| 1650 | BLP01583 | BLP01583 hypothetical protein |
| 1651 | BLP01584 | BLP01584 hypothetical protein |
| 1652 | BLP04857 | BLP04857 hypothetical protein |
| 1653 | BLP01585 | BLP01585 hypothetical protein |
| 1654 | BLP01586 | BLP01586 hypothetical protein |
| 1655 | BLP04725 | BLP04725 hypothetical protein |
| 1657 | BLP01589 | BLP01589 integrase like protein |
| 1658 | BLP01590 | BLP01590 phage protein |
| 1659 | BLP01591 | BLP01591 phage protein |
| 1660 | BLP01592 | BLP01592 phage portal like protein |
| 1661 | BLP01593 | BLP01593 phage head protein |
| 1662 | BLP01594 | BLP01594 phage protein |
| 1663 | BLP01595 | BLP01595 phage protein minor capsid-like |
| 1664 | BLP01596 | BLP01596 phage protein |
| 1665 | BLP01597 | BLP01597 hypothetical protein |
| 1666 | BLP01598 | BLP01598 hypothetical protein |
| 1667 | BLP04858 | BLP04858 hypothetical protein |
| 1668 | BLP01599 | BLP01599 hypothetical protein |
| 1669 | BLP01600 | BLP01600 hypothetical protein |
| 1677 | BLP01609 | BLP01609 hypothetical protein |
| 1684 | BLP01616 | BLP01616 hypothetical protein |
| 1688 | BLP04726 | BLP04726 hypothetical protein |
| 1692 | BLP01623 | BLP01623 hypothetical protein |
| 1694 | BLP01625 | BLP01625 hypothetical protein |
| 1703 | BLP01634 | BLP01634 hypothetical protein |
| 1704 | BLP01635 | BLP01635 hypothetical protein |
| 1728 | BLP01660 | BLP01660 hypothetical protein |
| 1732 | BLP01663 | BLP01663 hypothetical protein |
| 1734 | BLP01665 | BLP01665 hypothetical protein |
| 1736 | BLP01667 | BLP01667 hypothetical protein |
| 1775 | BLP01705 | BLP01705 hypothetical protein |
| 1783 | BLP04727 | BLP04727 hypothetical protein |
| 1816 | BLP01743 | BLP01743 hypothetical protein |
| 1831 | BLP01758 | BLP01758 hypothetical protein |
| 1838 | BLP01765 | BLP01765 hypothetical protein |
| 1851 | BLP01777 | BLP01777 hypothetical protein |
| 1853 | BLP01779 | BLP01779 hypothetical protein |
| 1866 | BLP01792 | BLP01792 hypothetical protein |
| 1887 | BLP01812 | BLP01812 hypothetical protein |
| 2002 | BLP01924 | BLP01924 hypothetical protein |
| 2007 | BLP01929 | BLP01929 hypothetical protein |
| 2022 | BLP04730 | BLP04730 hypothetical protein |
| 2038 | BLP01957 | BLP01957 hypothetical protein |
| 2044 | BLP01963 | BLP01963 hypothetical protein |
| 2067 | BLP01985 | BLP01985 hypothetical protein |
| 2072 | BLP01990 | BLP01990 hypothetical protein |
| 2076 | BLP04731 | BLP04731 hypothetical protein |
| 2094 | BLP04732 | BLP04732 hypothetical protein |
| 2106 | BLP02022 | BLP02022 hypothetical protein |
| 2119 | BLP02034 | BLP02034 hypothetical protein |
| 2120 | BLP02035 | BLP02035 hypothetical protein |
| 2121 | BLP02036 | BLP02036 hypothetical protein |
| 2124 | BLP02038 | BLP02038 hypothetical protein |
| 2131 | BLP02045 | BLP02045 conserved hypothetical protein |
| 2139 | BLP02049 | BLP02049 hypothetical protein |
| 2147 | BLP02056 | BLP02056 hypothetical protein |
| 2148 | BLP02057 | BLP02057 hypothetical protein |
| 2166 | BLP02075 | BLP02075 hypothetical protein |
| 2171 | BLP02080 | BLP02080 hypothetical protein |
| 2194 | BLP02103 | BLP02103 hypothetical protein |
| 2196 | BLP04733 | BLP04733 hypothetical protein |
| 2198 | BLP02106 | BLP02106 hypothetical protein |
| 2205 | BLP04735 | BLP04735 hypothetical protein |
| 2211 | BLP02117 | BLP02117 hypothetical protein |
| 2213 | BLP02119 | BLP02019 conserved hypothetical protein |
| 2216 | BLP02122 | BLP02122 conserved hypothetical protein |
| 2221 | BLP02127 | BLP02127 hypothetical protein |
| 2230 | BLP04736 | BLP04736 hypothetical protein |
| 2236 | BLP02142 | BLP02142 hypothetical protein |
| 2240 | BLP02146 | BLP02146 putative transcriptional regulator |
| 2255 | BLP02162 | BLP02162 hypothetical protein |
| 2258 | BLP04737 | BLP04737 hypothetical protein |
| 2263 | BLP04738 | BLP04738 hypothetical protein |
| 2273 | BLP04739 | BLP04739 hypothetical protein |
| 2277 | BLP02179 | BLP02179 hypothetical protein |
| 2286 | BLP04740 | BLP04740 hypothetical protein |
| 2292 | BLP04866 | BLP04866 conserved hypothetical protein |
| 2296 | BLP02195 | BLP02195 conserved hypothetical protein |
| 2297 | BLP04867 | BLP04867 highly conserved hypothetical protein |
| 2298 | BLP04868 | BLP04868 conserved hypothetical, putative |
| | | oxidoreductase |
| 2300 | BLP04821 | BLP04821 conserved hypothetical |
| 2303 | BLP04869 | BLP04869 hypothetical protein |
| 2304 | BLP02200 | BLP02200 resolvase |
| 2305 | BLP02201 | BLP02201 putative transposase |
| 2324 | BLP02222 | BLP02222 hypothetical protein |
| 2327 | BLP02225 | BLP02225 hypothetical protein |
| 2337 | BLP02235 | BLP02235 hypothetical protein |
| 2341 | BLP02239 | BLP02239 hypothetical protein |
| 2347 | BLP02245 | BLP02245 hypothetical protein |
| 2351 | BLP02249 | BLP02249 hypothetical protein |
| 2364 | BLP02262 | BLP02262 hypothetical protein |
| 2381 | BLP02279 | BLP02279 hypothetical protein |
| 2388 | BLP04741 | BLP04741 hypothetical protein |
| 2400 | BLP02297 | BLP02297 hypothetical protein |
| 2403 | BLP04743 | BLP04743 Adenine methyltransferase |
| 2408 | BLP02303 | BLP02303 hypothetical protein |
| 2410 | BLP02305 | BLP02305 hypothetical protein |
| 2411 | BLP04870 | BLP04870 hypothetical protein |
| 2414 | BLP04744 | BLP04744 hypothetical protein |
| 2415 | BLP02308 | BLP02308 hypothetical protein |
| 2424 | BLP02316 | BLP02316 hypothetical protein |
| 2425 | BLP04745 | BLP04745 hypothetical protein |
| 2430 | BLP02320 | BLP02320 hypothetical protein |
| 2435 | BLP04748 | BLP04748 hypothetical protein |
| 2439 | BLP04749 | BLP04749 hypothetical protein |
| 2457 | BLP02344 | BLP02344 hypothetical protein |
| 2467 | BLP02354 | BLP02354 hypothetical protein |
| 2468 | BLP04751 | BLP04751 hypothetical protein |
| 2469 | BLP04752 | BLP04752 hypothetical protein |
| 2483 | BLP02368 | BLP02368 hypothetical protein |
| 2491 | BLP02376 | BLP02376 hypothetical protein |
| 2498 | BLP02383 | BLP02383 hypothetical protein |
| 2504 | BLP02389 | yodV, yokI phage protein |
| 2505 | BLP04872 | yotK phage related sp-beta protein YotK |
| 2506 | BLP02390 | BLP02390 hypothetical phage protein |
| 2507 | BLP02391 | BLP02391 hypothetical phage protein |
| 2508 | BLP02392 | BLP02392 hypothetical phage protein |
| 2509 | BLP02393 | yotH phage protein YotH |
| 2510 | BLP04754 | BLP04754 hypothetical phage protein |
| 2511 | BLP02394 | yotB phage protein YotB |
| 2512 | BLP02395 | BLP02395 hypothetical protein |
| 2514 | BLP02396 | BLP02396 hypothetical protein |
| 2515 | BLP02397 | BLP02397 hypothetical protein |
| 2516 | BLP02398 | yosX phage protein |
| 2518 | BLP02400 | yosV YosV |
| 2519 | BLP02401 | BLP02401 hypothetical protein |
| 2520 | BLP02402 | yncF phage protein |
| 2521 | BLP02403 | BLP02403 hypothetical protein |
| 2525 | BLP02407 | BLP02407 hypothetical protein |
| 2526 | BLP02409 | BLP02408 HNH endonuclease |
| 2528 | BLP02411 | yosL YosL |
| 2529 | BLP02412 | BLP02412 hypothetical protein |
| 2530 | BLP02413 | yosI conserved hypothetical YosI |
| 2531 | BLP02414 | yosH phage like conserved hyopothetical YosH |
| 2532 | BLP02415 | BLP02415 conserved hypothetical protein |
| 2533 | BLP04755 | BLP04755 hypothetical protein |
| 2534 | BLP02416 | BLP02416 hypothetical protein |
| 2535 | BLP02417 | BLP02417 phage hypothetical protein |
| 2536 | BLP02418 | BLP02418 phage hypothetical protein |
| 2537 | BLP02419 | BLP02419 hypothetical protein |
| 2538 | BLP02420 | yorZ YorZ |
| 2539 | BLP02421 | yorY YorY |
| 2540 | BLP04875 | BLP04875 hypothetical protein |
| 2541 | BLP02422 | BLP02422 conserved hyopothetical |
| 2542 | BLP02423 | yorQ YorQ |
| 2543 | BLP02424 | BLP02424 hypothetical protein |
| 2544 | BLP04756 | yorP YorP |
| 2547 | BLP02427 | BLP02427 putative HNH endonuclease |
| 2549 | BLP02430 | yorJ spbeta like phage protein YorJ |
| 2551 | BLP02432 | yorH YorH |
| 2552 | BLP02433 | yorG ATP_GTP binding phage protein YorG |
| 2553 | BLP02434 | yorF conserved hypothetical phage protein YorF |
| 2554 | BLP04876 | yorE conserved hypothetical protein YorF |
| 2555 | BLP04758 | BLP04758 hypothetical protein |
| 2556 | BLP02435 | BLP02435 hypothetical protein |
| 2557 | BLP02436 | BLP02436 hypothetical protein |
| 2558 | BLP04877 | BLP04877 hypothetical protein |
| 2559 | BLP02437 | BLP02437 hypothetical protein |
| 2560 | BLP04759 | BLP04759 hypothetical protein |
| 2561 | BLP02438 | BLP02438 hypothetical protein |
| 2562 | BLP02439 | BLP02439 hypothetical protein |
| 2564 | BLP02441 | BLP02441 hypothetical protein |
| 2565 | BLP02442 | yoqX conserved hypothetical phage protein YoqX |
| 2567 | BLP02444 | BLP02444 hypothetical protein |
| 2568 | BLP02445 | BLP02445 hypothetical protein |
| 2569 | BLP02446 | BLP02446 hypothetical protein |
| 2570 | BLP02447 | BLP02447 hypothetical protein |
| 2571 | BLP04760 | BLP04760 hypothetical protein |
| 2572 | BLP04878 | BLP04878 hypothetical protein |
| 2573 | BLP02448 | BLP02448 hypothetical protein |
| 2575 | BLP02450 | BLP02450 hypothetical protein |
| 2576 | BLP02451 | BLP02451 hypothetical protein |
| 2577 | BLP02452 | BLP02452 hypothetical protein |
| 2579 | BLP02454 | BLP02454 hypothetical protein |
| 2580 | BLP02455 | BLP02455 hypothetical protein |
| 2581 | BLP04761 | BLP04761 hypothetical protein |
| 2582 | BLP02456 | yopR YopR |
| 2583 | BLP02457 | yopQ YopQ |
| 2584 | BLP02458 | yopP integrase family phage protein YopP |
| 2585 | BLP02459 | yopN SPBc2-like prophage-derived hypothetical |
| | | protein YopN |
| 2586 | BLP02460 | yopM Hypothetical protein YopM |
| 2587 | BLP02461 | BLP02461 hypothetical protein |
| 2588 | BLP02462 | yopK conserved hypothetical protein YopK |
| 2590 | BLP02463 | BLP02463 hypothetical protein |
| 2591 | BLP02464 | BLP02464 conserved hypothetical protein |
| 2592 | BLP02465 | BLP02465 hypothetical protein |
| 2594 | BLP04880 | BLP04880 hypothetical protein |
| 2595 | BLP02467 | BLP02467 conserved hypothetical protein |
| 2596 | BLP02468 | BLP02468 conserved hypothetical protein |
| 2597 | BLP02469 | BLP02469 hypothetical protein |
| 2598 | BLP02471 | BLP02471 hypothetical protein |
| 2599 | BLP02472 | BLP02472 hypothetical protein |
| 2600 | BLP02473 | BLP02473 hypothetical protein |
| 2601 | BLP02474 | BLP02474 hypothetical protein |
| 2602 | BLP02475 | BLP02475 hypothetical protein |
| 2603 | BLP02476 | BLP02476 hypothetical protein |
| 2604 | BLP02477 | BLP02477 conserved hypothetical protein |
| 2605 | BLP02478 | BLP02478 hypothetical protein |
| 2606 | BLP02479 | BLP02479 conserved hypothetical protein |
| 2607 | BLP02480 | BLP02476 hypothetical protein |
| 2608 | BLP02481 | BLP02476 hypothetical protein |
| 2609 | BLP02482 | BLP02482 hypothetical protein |
| 2610 | BLP02483 | BLP02483 hypothetical protein |
| 2611 | BLP02484 | BLP02483 hypothetical protein |
| 2612 | BLP02485 | BLP02485 hypothetical protein |
| 2613 | BLP02486 | yopB conserved phage hypothetical protein YopB |
| 2614 | BLP02487 | BLP02487 hypothetical protein |
| 2615 | BLP02488 | BLP02488 hypothetical protein |
| 2616 | BLP02489 | BLP02489 hypothetical protein |
| 2617 | BLP04881 | BLP04881 hypothetical protein |
| 2618 | BLP04882 | BLP04882 hypothetical protein |
| 2619 | BLP02490 | BLP02490 hypothetical protein |
| 2620 | BLP02491 | BLP02491 hypothetical protein |
| 2621 | BLP02492 | BLP02492 hypothetical protein |
| 2622 | BLP02493 | BLP02493 hypothetical protein |
| 2623 | BLP02494 | BLP02494 hypothetical protein |
| 2624 | BLP02495 | BLP02495 hypothetical protein |
| 2625 | BLP02496 | BLP02496 hypothetical protein |
| 2626 | BLP02497 | BLP02497 hypothetical protein |
| 2627 | BLP02498 | yonV hypothetical phage protein YonV |
| 2628 | BLP02499 | BLP02499 Putative GIY-YIG endonuclease |
| 2629 | BLP04762 | BLP04762 hypothetical protein |
| 2630 | BLP04763 | BLP04763 hypothetical protein |
| 2631 | BLP04883 | BLP04883 conserved hypothetical phage protein |
| 2633 | BLP04885 | BLP04885 hypothetical protein |
| 2634 | BLP02500 | BLP02500 hypothetical protein |
| 2635 | BLP02501 | BLP02501 conserved phage like protein |
| 2636 | BLP02502 | BLP02502 conserved phage related protein |
| 2638 | BLP02504 | BLP02504 hypothetical protein |
| 2639 | BLP02505 | BLP02505 conserved hypothetical protein |
| 2640 | BLP02506 | yonK YonK |
| 2641 | BLP02507 | yonJ phage protein YonJ |
| 2642 | BLP02508 | BLP02508 hypothetical protein |
| 2643 | BLP02509 | BLP02509 hypothetical protein |
| 2644 | BLP02510 | BLP02510 hypothetical protein |
| 2645 | BLP04886 | BLP04886 hypothetical protein |
| 2646 | BLP02511 | BLP02511 hypothetical protein |
| 2647 | BLP02512 | yonG YonG |
| 2648 | BLP02513 | yonF YonF |
| 2649 | BLP02514 | yonE YonE |
| 2650 | BLP02515 | yonD YonD |
| 2651 | BLP02516 | yonC YonC |
| 2652 | BLP02517 | yonB YonB |
| 2653 | BLP02518 | yonA YonA |
| 2654 | BLP02519 | yomZ YomZ |
| 2655 | BLP04822 | yomY YomY |
| 2656 | BLP02520 | yomX YomX |
| 2657 | BLP02521 | yomW YomW |
| 2658 | BLP02522 | yomV YomV |
| 2659 | BLP02523 | yomU YomU |
| 2661 | BLP02525 | yomS YomS |
| 2664 | BLP02527 | yomO conserved hypothetical phage protein YomO |
| 2665 | BLP04888 | yomN conserved hypothetical protein YomN |
| 2667 | BLP02529 | BLP02529 hypothetical protein |
| 2669 | BLP04889 | BLP04889 conserved hypothetical protein |
| 2670 | BLP02531 | yomK conserved hypothetical phage protein YomK |
| 2671 | BLP02532 | BLP02532 hypothetical protein |
| 2672 | BLP02533 | BLP02533 conserved hypothetical phage protein |
| 2673 | BLP02534 | yomJ YomJ |
| 2674 | BLP02535 | BLP02535 hypothetical protein |
| 2675 | BLP04890 | BLP04890 hypothetical protein |
| 2676 | BLP02536 | BLP02536 conserved hypothetical protein |
| 2677 | BLP02537 | BLP02537 hypothetical protein |
| 2679 | BLP02540 | yomH conserved phage protein YomH |
| 2680 | BLP02541 | yomG conserved phage protein YomG |
| 2681 | BLP02542 | yomF conserved phage protein YomF |
| 2684 | BLP02545 | BLP02545 hypothetical protein |
| 2685 | BLP04764 | BLP04764 putative holin |
| 2686 | BLP02546 | BLP02546 hypothetical protein |
| 2689 | BLP02549 | BLP02549 hypothetical protein |
| 2691 | BLP02551 | BLP02551 conserved hypothetical protein |
| 2692 | BLP04891 | yobK conserved hypothetical protein YobK |
| 2693 | BLP04892 | BLP04892 conserved hypothetical |
| 2696 | BLP02554 | yokH YokH |
| 2697 | BLP02555 | BLP02555 conserved hypothetical protein |
| 2706 | BLP02565 | BLP02565 conserved hypothetical protein |
| 2723 | BLP02581 | BLP02581 hypothetical protein |
| 2730 | BLP02588 | BLP02588 hypothetical protein |
| 2733 | BLP04893 | BLP04893 hypothetical protein |
| 2751 | BLP02608 | sspL Small, acid-soluble spore protein L (SASP L) |
| | | SspL |
| 2762 | BLP02619 | BLP02619 hypothetical protein |
| 2795 | BLP02651 | BLP02651 hypothetical protein |
| 2806 | BLP02662 | BLP02662 hypothetical protein |
| 2813 | BLP02669 | BLP02669 hypothetical protein |
| 2834 | BLP04766 | BLP04766 hypothetical protein |
| 2835 | BLP02690 | BLP02690 hypothetical protein |
| 2841 | BLP02696 | BLP02696 hypothetical protein |
| 2850 | BLP02705 | BLP02705 hypothetical protein |
| 2866 | BLP02722 | BLP02722 hypothetical protein |
| 2867 | BLP02723 | BLP02723 hypothetical protein |
| 2874 | BLP02730 | BLP02730 hypothetical protein |
| 2878 | BLP04767 | BLP04767 hypothetical protein |
| 2898 | BLP02752 | BLP02752 hypothetical protein |
| 2902 | BLP02756 | BLP02756 conserved hypothetical protein |
| 2904 | BLP02758 | BLP02758 hypothetical protein |
| 2917 | BLP02771 | BLP02771 hypothetical protein |
| 2947 | BLP04769 | BLP04769 hypothetical protein |
| 2957 | BLP04939 | BLP04939 hypothetical protein |
| 2960 | BLP02811 | BLP02811 hypothetical protein |
| 2969 | BLP02820 | BLP02820 hypothetical protein |
| 2972 | BLP04770 | BLP04770 hypothetical protein |
| 2973 | BLP02823 | BLP02823 hypothetical protein |
| 2999 | BLP02851 | BLP02851 hypothetical protein |
| 3004 | BLP02857 | BLP02857 hypothetical protein |
| 3019 | BLP02873 | BLP02873 hypothetical protein |
| 3028 | BLP02882 | BLP02882 hypothetical protein |
| 3054 | BLP02908 | BLP02908 hypothetical protein |
| 3064 | BLP02918 | BLP02918 conserved hypothetical protein |
| 3082 | BLP02936 | BLP02936 hypothetical protein |
| 3093 | BLP02947 | BLP02947 hypothetical protein |
| 3123 | BLP02976 | BLP02976 conserved hypothetical protein |
| 3137 | BLP04897 | BLP04897 conserved hypothetical protein |
| 3141 | BLP02993 | BLP02993 conserved hypothetical |
| 3142 | BLP04898 | BLP04898 conserved hypothetical protein |
| 3144 | BLP04824 | BLP04824 conserved hypothetical protein |
| 3148 | BLP02998 | BLP02998 hypothetical protein |
| 3149 | BLP02999 | BLP02999 putative resolvase |
| 3150 | BLP03000 | BLP03000 putative transposase |
| 3162 | BLP03011 | BLP03011 hypothetical protein |
| 3222 | BLP03071 | BLP03071 hypothetical protein |
| 3226 | BLP04902 | BLP04902 hypothetical protein |
| 3227 | BLP03076 | BLP03076 hypothetical protein |
| 3229 | BLP03078 | BLP03078 hypothetical protein |
| 3231 | BLP09003 | hypothetical protein |
| 3244 | BLP03092 | BLP03092 hypothetical protein |
| 3248 | BLP03097 | BLP03097 hypothetical protein |
| 3259 | BLP03108 | BLP03108 hypothetical protein |
| 3264 | BLP03113 | BLP03113 conserved hypothetical protein |
| 3287 | BLP03137 | BLP03137 hypothetical protein |
| 3291 | BLP04772 | BLP04772 hypothetical protein |
| 3303 | BLP04773 | BLP04773 hypothetical protein |
| 3310 | BLP03158 | BLP03158 hypothetical protein |
| 3311 | BLP03159 | BLP03159 hypothetical protein |
| 3321 | BLP03169 | BLP03169 hypothetical protein |
| 3324 | BLP03172 | BLP03172 hypothetical protein |
| 3355 | BLP03204 | BLP03204 hypothetical protein |
| 3362 | BLP03211 | BLP03211 hypothetical protein |
| 3371 | BLP04774 | BLP04774 hypothetical protein |
| 3429 | BLP03277 | BLP03277 hypothetical protein |
| 3434 | BLP03282 | BLP03282 hypothetical protein |
| 3442 | BLP03290 | BLP03290 hypothetical protein |
| 3446 | BLP04776 | BLP04776 hypothetical protein |
| 3458 | BLP03306 | BLP03306 conserved hypothetical protein |
| 3471 | BLP03319 | BLP03319 hypothetical protein |
| 3486 | BLP04903 | BLP04903 hypothetical protein |
| 3496 | BLP04904 | BLP04904 hypothetical protein |
| 3499 | BLP03344 | BLP03344 hypothetical protein |
| 3503 | BLP03348 | BLP03348 hypothetical protein |
| 3504 | BLP03349 | BLP03349 hypothetical protein |
| 3508 | BLP03353 | BLP03353 conserved hypothetical protein |
| 3549 | BLP03393 | BLP03393 hypothetical protein |
| 3558 | BLP04778 | BLP04778 hypothetical protein |
| 3577 | BLP03421 | BLP03421 hypothetical protein |
| 3593 | BLP04780 | BLP04780 hypothetical protein |
| 3598 | BLP03440 | BLP03440 hypothetical protein |
| 3601 | BLP03443 | BLP03443 hypothetical protein |
| 3603 | BLP04945 | BLP04945 conserved hypothetical |
| 3606 | BLP04781 | BLP04781 hypothetical protein |
| 3611 | BLP03451 | BLP03451 hypothetical protein |
| 3642 | BLP03483 | BLP03483 conserved hypothetical protein |
| 3653 | BLP03493 | BLP03493 hypothetical protein |
| 3655 | BLP03495 | BLP03495 hypothetical protein |
| 3670 | BLP03510 | BLP03510 hypothetical protein |
| 3673 | BLP03513 | BLP03513 hypothetical protein |
| 3682 | BLP03522 | BLP03522 hypothetical protein |
| 3690 | BLP04782 | BLP04782 hypothetical protein |
| 3694 | BLP03533 | BLP03533 hypothetical protein |
| 3707 | BLP03546 | BLP03546 hypothetical protein |
| 3716 | BLP03554 | BLP03554 hypothetical protein |
| 3727 | BLP04784 | BLP04784 hypothetical protein |
| 3736 | BLP04786 | BLP04786 hypothetical protein |
| 3737 | BLP03572 | BLP03572 hypothetical protein |
| 3744 | BLP03580 | BLP03580 conserved hypothetical protein |
| 3753 | BLP04788 | BLP04788 hypothetical protein |
| 3765 | BLP03598 | BLP03598 hypothetical protein |
| 3790 | BLP03623 | BLP03623 conserved hypothetical protein |
| 3798 | BLP09002 | hypothetical protein |
| 3799 | BLP03630 | BLP03630 hypothetical protein |
| 3872 | BLP03701 | BLP03701 hypothetical protein |
| 3881 | BLP03709 | BLP03709 hypothetical protein |
| 3885 | BLP03713 | BLP03713 conserved hypothetical protein |
| 3915 | BLP03742 | BLP03742 hypothetical protein |
| 3916 | BLP03743 | BLP03743 hypothetical protein |
| 3922 | BLP03749 | BLP03749 hypothetical protein |
| 3931 | BLP04790 | BLP04790 hypothetical protein |
| 3938 | BLP03764 | BLP03764 hypothetical protein |
| 3969 | BLP03795 | BLP03795 hypothetical protein |
| 4011 | BLP04829 | BLP04829 hypothetical protein |
| 4017 | BLP03843 | BLP03843 hypothetical protein |
| 4056 | BLP03881 | BLP03881 hypothetical protein |
| 4059 | BLP03884 | BLP03884 hypothetical protein |
| 4068 | BLP03893 | BLP03893 hypothetical protein |
| 4076 | BLP03901 | BLP03901 hypothetical protein |
| 4077 | BLP03902 | BLP03902 hypothetical protein |
| 4081 | BLP03906 | BLP03906 conserved hypothetical putative ATP |
| | | binding protein |
| 4082 | BLP03907 | BLP03907 hypothetical protein |
| 4085 | BLP03911 | BLP03911 conserved hypothetical |
| 4090 | BLP03916 | BLP03916 hypothetical protein |
| 4106 | BLP03932 | BLP03932 hypothetical protein |
| 4112 | BLP04792 | BLP04792 hypothetical protein |
| 4117 | BLP03942 | BLP03942 hypothetical protein |
| 4144 | BLP03969 | BLP03969 hypothetical protein |
| 4145 | BLP03970 | BLP03970 hypothetical protein |
| 4158 | BLP03983 | BLP03983 hypothetical protein |
| 4162 | BLP03986 | BLP03986 hypothetical protein |
| 4163 | BLP03987 | BLP03987 hypothetical protein |
| 4164 | BLP03988 | BLP03988 hypothetical protein |
| 4165 | BLP04793 | BLP04793 hypothetical protein |
| 4166 | BLP03989 | BLP03989 hypothetical protein |
| 4167 | BLP03990 | BLP03990 hypothetical protein |
| 4168 | BLP03991 | BLP03991 hypothetical protein |
| 4169 | BLP03992 | BLP03992 hypothetical protein |
| 4170 | BLP04907 | BLP04907 hypothetical protein |
| 4171 | BLP03993 | BLP03993 hypothetical protein |
| 4172 | BLP04794 | BLP04794 hypothetical protein |
| 4173 | BLP03994 | BLP03994 hypothetical protein |
| 4175 | BLP03995 | BLP03995 hypothetical protein |
| 4201 | BLP04021 | BLP04021 conserved hypothetical protein |
| 4235 | BLP04056 | BLP04056 hypothetical protein |
| 4285 | BLP04795 | BLP04795 hypothetical protein |
| 4288 | BLP04108 | BLP04108 hypothetical protein |
| 4305 | BLP04125 | BLP04125 hypothetical protein |
| 4323 | BLP04143 | BLP04143 hypothetical protein |
| 4333 | BLP04153 | BLP04153 conserved hypothetical protein |
| 4336 | BLP04156 | BLP04516 conserved hypothetical protein |
| 4353 | BLP04174 | BLP04174 hypothetical protein |
| 4398 | BLP04218 | BLP04218 hypothetical protein |
| 4409 | BLP04830 | atpE ATP synthase C chain AtpE |
| 4417 | BLP04236 | BLP04236 hypothetical protein |
| 4421 | BLP04240 | BLP04240 hypothetical protein |
| 4423 | BLP04796 | BLP04796 hypothetical protein |
| 4429 | BLP04247 | BLP04247 hypothetical protein |
| 4435 | BLP04797 | BLP04797 hypothetical protein |
| 4448 | BLP04799 | BLP04799 hypothetical protein |
| 4450 | BLP04265 | BLP04265 hypothetical protein |
| 4469 | BLP04283 | BLP04283 hypothetical protein |
| 4472 | BLP04286 | BLP04286 hypothetical protein |
| 4476 | BLP04801 | BLP04801 hypothetical protein |
| 4482 | BLP04294 | BLP04294 hypothetical protein |
| 4488 | BLP04300 | BLP04300 conserved hypothetical protein |
| 4513 | BLP04324 | BLP04324 hypothetical protein |
| 4518 | BLP04329 | BLP04329 hypothetical protein |
| 4544 | BLP04803 | BLP04803 hypothetical protein |
| 4559 | BLP04370 | BLP04370 hypothetical protein |
| 4560 | BLP04371 | BLP04371 hypothetical protein |
| 4569 | BLP04380 | BLP04380 hypothetical protein |
| 4571 | BLP04382 | BLP04382 hypothetical protein |
| 4578 | BLP04389 | BLP04389 hypothetical protein |
| 4607 | BLP04418 | BLP04418 conserved hypothetical protein |
| 4622 | BLP04804 | BLP04804 hypothetical protein |
| 4631 | BLP04441 | BLP04441 hypothetical protein |
| 4643 | BLP04453 | BLP04453 hypothetical protein |
| 4647 | BLP04458 | BLP04458 hypothetical protein |
| 4648 | BLP04459 | BLP04459 conserved hypothetical protein |
| 4658 | BLP04469 | BLP04469 hypothetical protein |
| 4669 | BLP04480 | BLP04480 hypothetical protein |
| 4682 | BLP04493 | BLP04493 conserved hypothetical protein |
| 4704 | BLP04515 | BLP04515 conserved hypothetical protein |
| 4718 | BLP04529 | BLP04529 hypothetical protein |
| 4754 | BLP04565 | BLP04565 hypothetical protein |
| 4767 | BLP04578 | BLP04578 hypothetical protein |
| 4786 | BLP04597 | BLP04597 hypothetical protein |
| 4792 | BLP04603 | BLP04603 hypothetical protein |
| 4797 | BLP04608 | BLP04608 hypothetical protein |
| 4804 | BLP04615 | BLP04615 highly conserved hypothetical protein |
| 4812 | BLP04805 | BLP04805 hypothetical protein |
| 4814 | BLP04806 | BLP04806 hypothetical protein |
| 4823 | BLP04631 | BLP04631 hypothetical protein |
| 4830 | BLP04638 | BLP04638 hypothetical protein |
| 4833 | BLP04641 | BLP04641 hypothetical protein |
| 4838 | BLP04646 | yycC conserved hypothetical protein YycC |
| 4848 | BLP04807 | BLP04661 hypothetical protein |
| 4849 | BLP04656 | cotF2 spore coat protein CotF2 |
| 4859 | BLP04665 | BLP04665 hypothetical protein |
| 4862 | BLP04808 | BLP04808 hypothetical protein |
| 4872 | BLP04677 | BLP04677 hypothetical protein |

TABLE 4
Extracellular proteins predicted in the Bacillus licheniformis SJ1904 genome

| SEQ | | Predicted Signal |
|---|---|---|
| ID | Gene Name & Product | Peptide Length |
| 166 | BLP00149 conserved hypothetical phage protein | 31 |
| 200 | BLP00180 hypothetical protein | 28 |
| 268 | pbpX penicillin-binding protein | 52 |
| 274 | ybbD Glycoside hydrolase, family 3 | 27 |
| 275 | ybbE putative beta-lactamase YbbE | 22 |
| 309 | ylfP conserved hypothetical protein | 39 |
| 326 | yubF conserved protein YubF | 34 |
| 339 | BLP00304 putative lytic transglycosylase YomI | 32 |
| 362 | penP beta-lactamase precursor | 35 |
| 385 | BLP00351 putative Proteinase inhibitor 14, serpin | 26 |
| 423 | yvbX conserved protein, Glycoside Hydrolase Family 18, YvbX | 36 |
| 424 | BLP00390 Chitinase precursor, Glycoside Hydrolase Family 18 | 27 |
| 425 | mpr Glutamyl Endo peptidase | 31 |
| 433 | yvcE putative peptidoglycan hydrolase, DL-endopeptidase II family | 31 |
| 483 | BLP00449 putative extracellular solute-binding protein | 32 |
| 500 | BLP04844 conserved hypothetical protein | 25 |
| 508 | yckK putative extracellular solute-binding protein, family 3 YckK | 25 |
| 539 | phy phytase | 30 |
| 571 | BLP00534 hypothetical protein | 26 |
| 620 | BLP00581 putative chitin binding protein | 42 |
| 700 | ywpE conserved protein YwpE | 26 |
| 720 | BLP04846 conserved hypothetical protein | 34 |
| 752 | yjeAA similarity to polysacharide deacetylase | 37 |
| 753 | yjeA Putative Carbohydrate Esterase Family 4 protein | 33 |
| 754 | amyL alpha amylase, Glycoside Hydrolase Family 13 | 30 |
| 764 | BLP00721 hypothetical protein | 18 |
| 767 | BLP00724 hypothetical protein | 37 |
| 768 | BLP00725 hypothetical protein | 28 |
| 770 | ydjN conserved hypothetical protein YdjN | 21 |
| 813 | yerB conserved hypothetical protein YerB | 28 |
| 818 | yerH conserved hypothetical YerH | 26 |
| 891 | BLP00846 putative carboxypeptidase | 29 |
| 934 | yfkD conserved protein YfkD | 26 |
| 937 | yfjS putative Carbohydrate Esterase Family 4 YfjS | 24 |
| 949 | BLP00905 hypothetical protein | 26 |
| 976 | BLP00932 putative extracellular solute-binding protein, family 1 | 26 |
| 1064 | yhcC conserved hypothetical protein YhcC | 28 |
| 1073 | yhcM conserved hypothetical protein YhcM | 31 |
| 1116 | BLP01067 putative glucose dehydrogenase | 26 |
| 1153 | BLP01105 hypothetical protein | 28 |
| 1183 | BLP01134 hypothetical protein | 24 |
| 1192 | prsA molecular chaperone PrsA | 30 |
| 1208 | BLP04713 hypothetical protein | 23 |
| 1231 | kerA KerA | 29 |
| 1233 | yhfQ putative transferase | 32 |
| 1247 | epr extracellular serine protease | 27 |
| 1264 | BLP04716 conserved hypothetical protein | 24 |
| 1279 | BLP01224 conserved hypothetical protein | 28 |
| 1313 | BLP01257 hypothetical protein | 31 |
| 1384 | BLP01329 conserved hypothetical protein | 31 |
| 1443 | abnA Glycoside Hydrolase Family 43 | 33 |
| 1446 | BLP01388 hypothetical protein | 30 |
| 1454 | yoeB conserved hypothetical protein YoeB | 23 |
| 1456 | yocH Peptidoglycan-binding protein | 26 |
| 1460 | BLP01401 hypothetical protein | 40 |
| 1514 | ggt gamma-glutamyltranspeptidase | 26 |
| 1557 | pel1 pectate lyase family 1, PelI | 25 |
| 1572 | BLP01513 hypothetical protein | 30 |
| 1581 | BLP01522 hypothetical protein | 27 |
| 1598 | pbpC penicillin-binding protein 3 | 30 |
| 1629 | BLP01571 conserved hypothetical protein | 30 |
| 1632 | BLP01573 conserved hypothetical protein | 31 |
| 1682 | BLP01614 hypothetical protein | 26 |
| 1698 | ykvT putative Cell wall hydrolase YkvT | 25 |
| 1703 | BLP01634 hypothetical protein | 20 |
| 1705 | BLP01636 conserved hypothetical protein | 22 |
| 1717 | ykwD Allergen V5_Tpx-1 related YkwD | 27 |
| 1733 | BLP01664 hypothetical protein | 28 |
| 1867 | bprA bacillopeptidase F | 28 |
| 1868 | bprB bacillopeptidase F | 31 |
| 2003 | celA Glycoside Hydrolase Family 9 | 41 |
| 2005 | celC Glycoside Hydrolase Family 5 | 34 |
| 2006 | celD Glycoside Hydrolase family 5 | 32 |
| 2038 | BLP01957 hypothetical protein | 31 |
| 2064 | BLP01982 hypothetical protein | 29 |
| 2132 | BLP04819 hypothetical protein | 25 |
| 2145 | BLP04934 hypothetical protein | 31 |
| 2154 | yoaW conserved hypothetical protein YoaW | 26 |
| 2166 | BLP02075 hypothetical protein | 33 |
| 2167 | BLP02076 phage-like protein | 38 |
| 2237 | bglC endo-1,4-beta-glucanase, Glycoside hydrolase Family 5 | 50 |
| 2242 | ywoF Polysaccharide Lyase Family 9, YwoF | 22 |
| 2247 | BLP02154 conserved hypothetical protein | 27 |
| 2271 | dctB possible C4-dicarboxylate binding protein | 29 |
| 2287 | dacC penicillin-binding protein (D-alanyl-D-alanine | 29 |
| | carboxypeptidase) | |
| 2343 | BLP02241 hypothetical protein | 37 |
| 2387 | yocA putative Glycoside Hydrolase Family 23 YocA | 29 |
| 2394 | BLP02291 conserved hypothetical protein | 33 |
| 2397 | yocH conserved hypothetical protein YocH | 26 |
| 2412 | BLP02306 conserved hypothetical protein | 34 |
| 2425 | BLP04745 hypothetical protein | 24 |
| 2432 | BLP02322 hypothetical protein | 24 |
| 2456 | yvgO conserved protein YvgO | 25 |
| 2466 | yojL gamma-D-glutamate-meso-diaminopimelate muropeptidase | 27 |
| | YojL | |
| 2486 | ctpA carboxy-terminal processing protease | 37 |
| 2489 | yodJ putative carboxypeptidase | 31 |
| 2540 | BLP04875 hypothetical protein | 27 |
| 2556 | BLP02435 hypothetical protein | 24 |
| 2587 | BLP02461 hypothetical protein | 23 |
| 2592 | BLP02465 hypothetical protein | 26 |
| 2593 | BLP02466 Putative subtilase family protease | 37 |
| 2632 | BLP04884 conserved hypothetical protein | 29 |
| 2646 | BLP02511 hypothetical protein | 26 |
| 2697 | BLP02555 conserved hypothetical protein | 29 |
| 2719 | ypmR conserved protein YpmR | 24 |
| 2721 | ypmQ conserved hypothetical YpmQ | 25 |
| 2732 | ypjP conserved hypothetical protein YpjP | 30 |
| 2788 | aspB aspartate aminotransferase | 23 |
| 2789 | ypmB conserved protein YpmB | 25 |
| 2806 | BLP02662 hypothetical protein | 28 |
| 2837 | yphF conserved hypothetical protein YphF | 29 |
| 2852 | sleB spore cortex-lytic enzyme, secreted across spore | 34 |
| 2854 | BLP02710 L-asparaginase | 18 |
| 2858 | ypbG putative hydrolase YpbG | 27 |
| 2869 | BLP02725 putative peptidogycan hydrolase | 29 |
| 2873 | yheN Carbohydrate Esterase Family 4, YheN | 53 |
| 2875 | BLP02731 conserved hypothetical protein | 29 |
| 2887 | dacB D-alanyl-D-alanine carboxypeptidase (penicillin-binding protein | 28 |
| | 5*) | |
| 2902 | BLP02756 conserved hypothetical protein | 33 |
| 2906 | ypuA conserved hypothetical protein YpuA | 90 |
| 2921 | dacF penicilin binding protein (putative D-alanyl-D-alanine | 28 |
| | carboxypeptidase) | |
| 2948 | lip lipase | 31 |
| 2967 | lacA3 LacA3 | 24 |
| 2985 | BLP02835 conserved hypothetical protein | 31 |
| 2999 | BLP02851 hypothetical protein | 29 |
| 3017 | yqiI N-acetylmuramoyl-L-alanine amidase autolysin YqiI | 36 |
| 3021 | BLP04895 conserved hypothetical protein | 26 |
| 3070 | tasA translocation-dependent antimicrobial spore component | 28 |
| 3072 | yqxM secreted biofilm formation protein YqxM | 44 |
| 3073 | yqzG conserved hypothetical protein YqzG | 24 |
| 3090 | yqgU conserved protein YqgU | 28 |
| 3116 | yqfZ conserved protein YqfZ | 40 |
| 3145 | gerKC putative spore germination protein | 34 |
| 3181 | yqfA conserved hypothetical protein YqfA | 37 |
| 3216 | yqeF conserved hypothetical YqeF | 31 |
| 3285 | BLP03135 putative phosphoesterase | 32 |
| 3286 | BLP03136 Esterase_lipase_thioesterase family protein | 27 |
| 3290 | yndA conserved hypothetical protein | 28 |
| 3293 | sacC Glycoside Hydrolase Family 32 | 24 |
| 3332 | yrrS conserved protein YrrS | 50 |
| 3359 | yrvJ N-acetylmuramoyl-L-alanine amidase YrvJ | 29 |
| 3375 | BLP03223 conserved hypothetical protein | 28 |
| 3383 | ymaC phage-related protein YmaC | 24 |
| 3457 | BLP03305 hypothetical protein | 33 |
| 3461 | BLP03309 hypothetical protein | 28 |
| 3494 | BLP03340 conserved hypothetical protein | 33 |
| 3496 | BLP04904 hypothetical protein | 68 |
| 3518 | abnA-like Glycoside Hydrolase Family 43 | 28 |
| 3653 | BLP03493 hypothetical protein | 27 |
| 3659 | yteS conserved protein YteS | 26 |
| 3682 | BLP03522 hypothetical protein | 28 |
| 3707 | BLP03546 hypothetical protein | 28 |
| 3708 | ytkA conserved protein YtkA | 29 |
| 3744 | BLP03580 conserved hypothetical protein | 28 |
| 3787 | BLP03620 Glycoside Hydrolase Family 12 | 30 |
| 3824 | BLP03654 hypothetical protein | 30 |
| 3850 | BLP03680 conserved hypothetical protein | 22 |
| 3868 | yuiC conserved protein YuiC | 34 |
| 3885 | BLP03713 conserved hypothetical protein | 28 |
| 3903 | yunA putative metallopeptidase | 22 |
| 3925 | bsn extracellular ribonuclease | 40 |
| 3963 | yusW conserved hypothetical protein YusW | 28 |
| 3983 | liaG conserved protein LiaG | 39 |
| 4026 | bdbD thiol-disulfide oxidoreductase | 36 |
| 4028 | BLP03854 putative Extracellular solute-binding protein | 27 |
| 4032 | BLP03858 putative Glycoside Hydrolase Family 3 | 31 |
| 4044 | BLP03870 hypothetical protein | 31 |
| 4118 | BLP03943 hypothetical protein | 26 |
| 4156 | sacB levansucrase, Glycoside Hydrolase Family 68 | 30 |
| 4157 | levB endolevanase, Glycoside Hydrolase Family 32 | 33 |
| 4193 | BLP04013 putative ribonuclease | 29 |
| 4213 | yvpB putative cysteine protease YvpB | 39 |
| 4214 | pelC Polysaccharide Lyase Family 3, putative pectate lyase | 29 |
| 4223 | yvnB conserved hypothetical protein YvnB | 29 |
| 4237 | ctpB Peptidase S41A, C-terminal protease | 37 |
| 4240 | BLP04061 conserved hypothetical protein, putative peptidase | 29 |
| 4244 | cccB putative cytochrome c551 heme binding protein | 27 |
| 4283 | lytB modifier protein of major autolysin LytC (CWBP76) | 26 |
| 4297 | lytD N-acetylglucosaminidase Glycoside Hydrolase Family 73 | 29 |
| 4312 | pgdS gamma-DL-glutamyl hydrolase | 34 |
| 4396 | ywmD conserved hypothetical protein containing VWFA domain | 25 |
| | YwmD | |
| 4397 | ywmC conserved hypothetical protein containing VWFA domain | 24 |
| | YwmC | |
| 4401 | ywmB conserved protein YwmB | 30 |
| 4468 | BLP04282 hypothetical protein | 25 |
| 4566 | ywaD Putative aminopeptidase | 31 |
| 4619 | lanP intracellular serine protease | 25 |
| 4625 | pellI pectate lyase, Polysaccharide Lyase Family 1 | 28 |
| 4638 | ansA L-asparaginase | 29 |
| 4646 | BLP04457 conserved hypothetical protein | 25 |
| 4647 | BLP04458 hypothetical protein | 30 |
| 4654 | BLP04465 putative Glycerophosphoryl diester phosphodiesterase | 30 |
| 4655 | yhjA conserved hypothetical protein | 28 |
| 4670 | BLP04481 hypothetical protein | 73 |
| 4678 | BLP04489 putative extracellular solute-binding protein | 29 |
| 4681 | BLP04492 hypothetical protein | 34 |
| 4689 | BLP04500 hypothetical protein | 30 |
| 4721 | yxiA Glycoside hydrolase, family 43 YxiA | 29 |
| 4734 | ydaJ putative Glycoside transferase | 29 |
| 4777 | yxeA conserved hypothetical protein | 34 |
| 4781 | yvfO Glyccosyl Hydrolase Family 53 | 28 |
| 4785 | cycB putative extracellular solute-binding protein, family 1 CycB | 32 |
| 4802 | BLP04613 hypothetical protein | 27 |
| 4810 | BLP04621 hypothetical protein | 34 |
| 4813 | BLP04836 putative bacteriocin | 42 |

TABLE 5
Codon usage table for the Bacillus licheniformis SJ1904 chromosome
assembled using Artemis software (K. Rutherford, J. Parkhill, J. Crook,
T. Horsnell, P. Rice, M-A. Rajandream and B. Barrell. 2000. Artemis: sequence
visualisation and annotation. Bioinformatics 16: 944-945).

| | | | |
|---|---|---|---|
| ttt 29.8 (37864) | tct 9.1 (11536) | tat 20.5 (26064) | tgt 2.9 (3758) |
| ttc 16.3 (20684) | tcc 9.3 (11879) | tac 13.3 (16932) | tgc 5.4 (6918) |
| tta 14.4 (18259) | tca 12.5 (15847) | taa 0.2 (368) | tga 0.5 (642) |
| ttg 17.9 (22781) | tcg 10.3 (13048) | tag 0.1 (172) | tgg 10.3 (13070) |
| ctt 22.3 (28263) | cct 9.4 (11912) | cat 13.5 (17194) | cgt 5.1 (6472) |
| ctc 14.7 (18656) | ccc 4.5 (5810) | cac 8.4 (10668) | cgc 11.1 (14112) |
| cta 3.3 (4238) | cca 4.3 (5535) | caa 16.8 (21289) | cga 3.5 (4528) |
| ctg 25.0 (31731) | ccg 18.9 (24037) | cag 18.9 (24027) | cgg 8.6 (10955) |
| att 29.5 (37460) | act 6.1 (7825) | aat 19.3 (24529) | agt 4.0 (5161) |
| atc 34.0 (43124) | acc 9.6 (12284) | aac 19.2 (24386) | agc 15.8 (20074) |
| ata 7.7 (9850) | aca 17.0 (21587) | aaa 49.9 (63316) | aga 10.1 (12863) |
| atg 26.5 (33584) | acg 18.9 (23979) | aag 21.9 (27854) | agg 6.7 (8550) |
| gtt 17.4 (22162) | gct 16.0 (20317) | gat 29.1 (36898) | ggt 10.0 (12684) |
| gtc 23.6 (30011) | gcc 21.1 (26730) | gac 21.7 (27552) | ggc 26.1 (33149) |
| gta 9.6 (12286) | gca 18.3 (23209) | gaa 51.5 (65281) | gga 22.3 (28354) |
| gtg 15.7 (19894) | gcg 23.4 (29646) | gag 21.6 (27398) | ggg 12.1 (15429) |

The numbers in parentheses denote the total occurrences of a particular codon among all CDSs, and the number to the right of each codon reflects its frequency per 1000 codons

### SEQUENCE LISTINGS

[0300] Incorporated herein by reference are 2 copies of the Sequence Listing on compact disk. Copy 1 is done on a Intel x86 machine format, in Windows XP operating system compatibility, there is one file saved as 01 Seq List 29-NOV-2006.txt, and is 20,404 KB, and was created on Nov. 16, 2006. Copy 2 is identical to Copy 1. The content of the attached compact disks are the same and includes no new matter.

### Deposit of Biological Material

[0301] The following biological material has been deposited under the terms of the Budapest Treaty with the American Type Culture Collection, 10801 University Blvd. Manassas, Va. 20110-2209 USA, and given the following accession number:

| Deposit | Accession Number | Date of Deposit |
|---|---|---|
| B. licheniformis | ATCC PTA-7992 | Nov. 8, 2006 |
| SJ1904 DNA | | |

[0302] The strain has been deposited under conditions that assure that access to the culture will be available during the pendency of this patent application to one determined by the Commissioner of Patents and Trademarks to be entitled thereto under 37 C.F.R. §1.14 and 35 U.S.C. §122. The deposit represents a substantially pure culture of the deposited strain. The deposit is available as required by foreign patent laws in countries wherein counterparts of the subject application, or its progeny are filed. However, it should be understood that the availability of a deposit does not constitute a license to practice the subject invention in derogation of patent rights granted by governmental action.

[0303] The invention described and claimed herein is not to be limited in scope by the specific aspects herein disclosed, since these aspects are intended as illustrations of several aspects of the invention. Any equivalent aspects are intended to be within the scope of this invention. Indeed, various modifications of the invention in addition to those shown and described herein will become apparent to those skilled in the art from the foregoing description. Such modifications are also intended to fall within the scope of the appended claims. In the case of conflict, the present disclosure including definitions will control.

[0304] Various references are cited herein, the disclosures of which are incorporated by reference in their entireties.

1. An isolated polynucleotide encoding a biologically active substance, selected from the group consisting of:
(a) a polynucleotide comprising a nucleotide sequence having at least 60% identity with a polynucleotide selected from the group consisting of SEQ ID NOs: 2-4876 and subsequences thereof encoding fragments having biological activity;
(b) a polynucleotide comprising a nucleotide sequence that hybridizes under at least medium stringency conditions with a polynucleotide selected from the group consisting of SEQ ID NOs: 2-4876 and full-length complementary strands thereof;
(c) a polynucleotide encoding a biologically active substance comprising an amino acid sequence having at least 60% identity with an amino acid sequence selected from the group consisting of SEQ ID NOs: 4877-9751 and fragments thereof retaining biological activity;
(d) a polynucleotide encoding an artificial variant comprising a substitution, deletion, and/or insertion of one or more amino acids of an amino acid sequence selected from the group consisting of SEQ ID NOs: 4877-9751 and fragments thereof retaining biological activity; and
(e) a polynucleotide comprising or consisting of any of SEQ ID NOs: 2-4876.

2. (canceled)

3. (canceled)

4. (canceled)

5. (canceled)

6. (canceled)

7. The isolated polynucleotide of claim 1, which is contained in the chromosome of Bacillus licheniformis SJ1904 (ATCC PTA-7992).

8. (canceled)

9. (canceled)

10. A recombinant host cell comprising the isolated polynucleotide of claim 1.

11. An isolated biologically active substance, selected from the group consisting of:
(a) a biologically active substance comprising an amino acid sequence having at least 60% identity with an amino acid sequence selected from the group consisting of SEQ ID NOs: 4877-9751 and fragments thereof retaining biological activity;
(b) a biologically active substance encoded by a polynucleotide comprising a nucleotide sequence having at least 60% identity with a polynucleotide selected from the group consisting of SEQ ID NOs: 2-4876 and subsequences thereof encoding fragments having biological activity;
(c) a biologically active substance encoded by a polynucleotide comprising a nucleotide sequence that hybridizes under at least medium stringency conditions with a polynucleotide selected from the group consisting of SEQ ID NOs: 2-4876 and full-length complementary strands thereof;
(d) an artificial variant comprising a substitution, deletion, and/or insertion of one or more amino acids of an amino acid sequence selected from the group consisting of SEQ ID NOs: 4877-9751 and fragments thereof retaining biological activity; and
(e) a biologically active substance comprising or consisting of an amino acid sequence selected from the group consisting of SEQ ID NOs: 4877-9751 and fragments thereof retaining biological activity.

12. (canceled)

13. (canceled)

14. (canceled)

15. (canceled)

16. (canceled)

17. The biologically active substance of claim 11, which is encoded by a polynucleotide contained in the chromosome of Bacillus licheniformis SJ1904 (ATCC PTA-7992).

18. (canceled)

19. A method for producing the biologically active substance of claim 11, comprising (a) cultivating a host cell comprising a nucleic acid construct comprising a polynucleotide encoding the biologically active substance under conditions conducive for production of the biologically active substance; and (b) recovering the biologically active substance.

20. A method for producing a mutant of a parent cell, which comprises disrupting or deleting the polynucleotide of claim 1, which results in the mutant producing less of the biologically active substance than the parent cell.

21. A mutant cell produced by the method of claim 20.

22. (canceled)

23. (canceled)

24. (canceled)

25. A transgenic plant, plant part or plant cell, which has been transformed with the isolated polynucleotide of claim 1.

26. A double-stranded inhibitory RNA (dsRNA) molecule comprising a subsequence of the polynucleotide of claim 1, wherein optionally the dsRNA is a siRNA or a miRNA molecule.

27. (canceled)

28. A method of inhibiting the expression of a polypeptide having biological activity in a cell, comprising administering to the cell or expressing in the cell a double-stranded RNA (dsRNA) molecule, wherein the dsRNA comprises a subsequence of the polynucleotide of claim 1.

29. (canceled)

30. A method for isolating a gene encoding an enzyme, comprising:
(a) adding a mixture of labeled first nucleic acid probes, isolated from a microbial strain cultured on medium without an inducing substrate, and labeled second nucleic acid probes, isolated from the microbial strain cultured on medium with the inducing substrate, to an array of Bacillus licheniformis polynucleotides of claim 1, under conditions where the labeled nucleic acids hybridize to full-length complementary sequences of the Bacillus licheniformis polynucleotides on the array, wherein the first nucleic acid probes are labeled with a first reporter and the second nucleic acid probes are labeled with a second reporter;
(b) examining the array under conditions wherein the relative expression of the genes of the microbial strain is determined by the observed hybridization reporter signal of each spot on the array in which (i) the Bacillus licheniformis polynucleotides on the array that hybridize to the first nucleic acid probes produce a distinct first hybridization reporter signal or to the second nucleic acid probes produce a distinct second hybridization reporter signal indicating induction of a gene by the presence of the inducing substrate in the culture medium of the microorganism, and (ii) the Bacillus licheniformis polynucleotides on the array that hybridize to both the first and second nucleic acid probes produce a distinct combined hybridization reporter signal; and
(c) isolating from the microbial strain a gene induced by the presence of the substrate, wherein the gene encodes an enzyme that is involved in the degradation or conversion of the substrate.

31. (canceled)

32. (canceled)

33. (canceled)

34. (canceled)

35. A method for monitoring differential expression of a plurality of genes in a first bacterial cell relative to expression of the same genes in one or more second bacterial cells, comprising:
(a) adding a mixture of detection reporter-labeled nucleic acids isolated from the bacterial cells to a substrate containing an array of Bacillus licheniformis polynucleotides of claim 1, under conditions where the detection reporter-labeled nucleic acids hybridize to full-length complementary sequences of the Bacillus licheniformis polynucleotides on the array, wherein the nucleic acids from the first bacterial cell and the one or more second bacterial cells are labeled with a first detection reporter and one or more different second detection reporters, respectively; and
(b) examining the array under conditions wherein the relative expression of the genes in the bacterial cells is determined by the observed detection signal of each spot on the array in which (i) the Bacillus licheniformis polynucleotides on the array that hybridize to the nucleic acids obtained from either the first or the one or more second bacterial cells produce a distinct first detection signal or one or more second detection signals, respectively, and (ii) the Bacillus licheniformis polynucleotides on the array that hybridize to the nucleic acids obtained from both the first and one or more second bacterial produce a distinct combined detection signal.

36. (canceled)

37. (canceled)

38. (canceled)

39. A computer readable medium having recorded thereon an array of Bacillus licheniformis polynucleotides of claim 1, for monitoring differential expression of a plurality of genes in a first bacterial cell relative to expression of the same genes in one or more second bacterial cells.

40. (canceled)

41. (canceled)

42. (canceled)

43. (canceled)

44. A computer-based system for monitoring differential expression of a plurality of genes in a first bacterial cell relative to expression of the same genes in one or more second bacterial cells comprising the following elements:
(a) a data storage means comprising Bacillus licheniformis polynucleotides of claim 1;
(b) a search means for comparing a target sequence to a Bacillus licheniformis polynucleotide sequence of the data storage means of step (a) to identify homologous sequences; and
(c) a retrieval means for obtaining the homologous sequence(s) of step (b).

45. A substrate comprising an array of Bacillus licheniformis polynucleotides of claim 1, for monitoring differential expression of a plurality of genes in a first bacterial cell relative to expression of the same genes in one or more second bacterial cells.

46. A method for preparing a synthetic gene, comprising:
(a) generating a codon usage table based on codons used in one or more open reading frames or portions thereof of SEQ ID NO: 1;
(b) constructing a synthetic gene or portion thereof that contains in place of one or more native codons one or more preferred codons from the codon usage table; and
(c) recovering the synthetic gene.

47. (canceled)

48. A synthetic gene obtained by the method of claim 46.

49. (canceled)

50. (canceled)

51. (canceled)

52. A method for producing a polypeptide encoded by the synthetic gene of claim 48 comprising (a) cultivating a host cell comprising the synthetic gene under conditions conducive for production of the polypeptide; and (b) recovering the polypeptide.

53. An isolated polynucleotide of the complete chromosomal DNA molecule of Bacillus licheniformis SJ1904 (ATCC PTA-7992) having the nucleotide sequence of SEQ ID NO: 1.

The application's sequence listing, which the Patent Office published only in electronic form, follows.

SEQUENCE LISTING (9751 sequences)

SEQ ID NO: 1 - DNA, 4345159 bp, Bacillus licheniformis (residues 1-1,448,387 of 4,345,159)
cgaaagcctaatttcatttttcctcaattttagcttaaaagatttttttggaagcgggaaaacgggatggacgaagcgaaaaaaagccaatgtggatatctttctcctcgttttttctatccacaatcattatcgacaacattttcacaaaactaaccgttgtggacaatatttcttcaacagtttgtatagtatgtggataagttcctcgcaaccattgcaaccactcgcttattctgatattatatttgtgttttaactcttgataacaaattggctgccaatccattatccacaaactgtggataagttgtggaaagttttttcacagggtgtgcagtattttgtccacatcttgtgaaaaatgtcgaaaagacgtttttctactatattatatgttttcaacatttcattaacgaatggactcatccatttgctctttttttgtgttctataacaggttgaacaagcaaatattgctggtaaaggagggacgaaccgccattatgaaaaacatatcggatctttggaatcaagctttggggcagatcgaaaaaaaattgagcaagcccagctttgaaacatggatgaaatcgacaaaggcccattcattgcagggcgatacgctgatcatcaccgcaccgaacgagttcgccagagactggcttgaatcaagatacctgcacctgatcgccgatacgatctatgatctgacaggagaagaattgagcattaaatttgtcattcctcagaatcaaaatgaagaagattttatgccaaagtctccaatcaaaaaaatgtcgaaagaagaaccggctgattttccgcaaaacatgctgaatcccaaatatacatttgatacgttcgttatcggttcaggaaaccgattcgcccacgcagcgtctttggcagtggctgaagccccggcgaaagcttacaatccgctgtttatttacgggggagtcggacttggaaagactcacttaatgcatgcgatcgggcactatgtcatcgatcacaatccatctgcaaaagtggtttatttgtcatctgagaaatttacaaatgagttcattaactcgatccgtgacaataaagctgtcgattttcgcaatcgctatcgaaatgttgacgttcttttaatagacgatattcaatttttagccggaaaagaacagacgcaagaggaatttttccatacgtttaatacgctgcatgaagaaacaaagcagattgtcatttccagcgaccggcctccaaaagagatcccaacgcttgaagaccgtttgcgctcccgttttgaatggggattgatcactgacatcacgcctcctgatctggaaacaagaattgcgattttaagaaagaaagcaaaagcagaaggacttgatatcccgaatgaagtcatgctttatattgccaatcagatcgacagcaatatcagggagctggaaggggcattaatcagggttgtcgcatattcttccttgatcaataaagacattaacgccgatctggctgctgaagctttgaaagatatcattccttcttcaaagccgaaagtcattacgatcaaagacatccaaagaatcgtcggccagcagttcaatatcaagctggaggatttcaaggcgaagaaacggacaaaatcggtggcttttccgcggcagatcgctatgtatctatcaagagaaatgacagattcttctcttccgaagatcggcgaagaatttggcggacgcgaccacacgacggtcatccatgcccatgagaaaatatcaaaactgctgaacgatgatgaacagcttcagcagcagattaaagaaattaaagagcagctgagataagtgatgagcgggaaagtgtgaataacttgaacatggccttacacagtctgtccacatgtggataggctgtgtttccgttcttttttcacttatccacaaatccacagcccctactagtacttctgctatttttttaaaacataataattaatagattcccgcaaggaggatgattatgaagtttacaattcaaaaagaccgcctggtcgaaagtgtccaagatgtgttaaaagccgtttcttcaagaacgacgattccgatcttaaccggtattaaaatcgtggcctctgatgaaggggtctctctgacaggcagcgattccgatatttcgattgaatcgtttatcccgaaagaagacggcgatttagagatcgtgacaattgaacagcccggcagcattgtgcttcaagcccgttttttcagtgaaattgtcaaaaagctgccgatgtcaacagtggaaatcgaggttcaaaatcaatacttaacgatcatccgctccggcaaagcagagtttaacttaaacggtttggatgcaagcgaatatccgcttttgccgcaaattgaagagcatcacgcttttcaaattccgaccgatctgctgaaaaacctgatccgccaaaccgtttttgcagtgtccacctcagaaacacgcccaatcttgacaggtgtaaactggaatgtcactggcggtgaattaatatgcactgcaacggatagtcatcgtcttgcgctaaggaaagctaagctcgacattaacgaagacagttcatacaatgtcgtcatcccaggaaaaagcttaaccgagctcagcaaaatccttgatgaccatcaggagcttgtcgatattgtgattaccgaaacacaagtgctgtttaaaacaaaaaacgttctgtttttctccaggcttcttgacggaaactatccggatacgaaccgcctgattcctcaggaaagcaaaacgaacttgattgtcaatactaaggaatttctccaggcgatcgacagggcttcgcttttggcgagagaaggacgaaacaacgtggtgaaactttccgcagccgccaatgagtcgatcgaaatttcttcaaactctccggaaatcggaaaggttgttgaaacggtgaatgccgagcagatcgaaggggaagacttaaagatatcctttagtccgaaatatatgctggatgcccttaaagttcttgaaggagaggacattcatgtaagcttcacaggcgctatgaggccttttctgatccgtacgccgaatgacgattcgatcgtccaattaattcttcctgtccggacgtattaatttgttggaatagaaagttgccggctggtccggcagcttctcttattttttctggagaaaagcgctctcgccctgccttgattgctcataccgcaagtttcccctttccttctttccctgttttttagtacaattagatattagtgatattgaaagaggtcgatataatgacaaagacggtggctattgatacagagatgattaccctcggccagtttttgaaattggcggatgtcattcagtccggaggaatggcaaaatggtttttatcggaatatgaagtactcgtcaatgacgagccggataaccgccgcggacgaaaactgtatgtcggagatgtggtgacgattgaaggattcggttcatttcaagtcgtcggctaaaagcaggtggtattgattgtatatccaaaatcttacattatcgtcttaccgtaattatgagcgccttgaccttcaatttgagaacaaagtgaacgtgattatcggagagaacgctcaaggaaaaacaaatttgatggaagcgatctatgtgcttgcgatggcgaaatcccatcggacgtcaaatgataaagaactcatacgatgggatgaagactatgctaaaatagaaggcagggtcattaaaaaaaacggttctgttcccattcagcttgtgatttccaaaaaaggaaaaaaaggtaaagtgaatcatattgaacagcagaagctgagccagtatgtcggggctgtcaacacgattatgttcgcgccggaggatttaaatctcgtaaaaggaagtcctcaggtcagaagaaggtttctcgacatggaaatcggccaagtatcacctgtctatcttcatgacctttctctttaccaaaaaatcctttcacaacggaatcatttcttgaagcagcttcaaacgagaaagcaaaccgatcaaacgatgcttgacgtgctgacggaacagcttacggaattcgcggcaaaggttgtgatgaaacggcttcagtttgtcgatcagcttgaaaaatgggctcagcccattcattccggaatttcaagaggtctggaagagctgacgttaaagtatcatacgtctcttcacgtatcagattcgcccgatttgtcgaaaatgatcaatagttatcaagaaacgttttctaaattaagagataaagaaatagaacggggggtatctctttcaggtccccacagggatgatgttcttttctatgtcaatggccgtgatgtgcagacttacggatcgcagggccagcagcgcacgactgcattgtcgcttaaattggctgaaatcgacttgattcaggaagagataggagaatacccgattctgcttttggatgatgttttatcagagctggacgactatcggcagtctcacttgctccacaccattcaaggccgcgttcaaacattcgtaacaacgacaagcgttgatggaattgatcataaaaccttaaacgaagcggaaatctttcgtgttgaaaatggcacgctatcggactgaaaaaatggggtgagggattgtatatccacttaggtgacgattttgtcgtctcaacgcgtgaaattgtggctatttttgattacaaggcaaagacatcgccgattgttgaggagtttttaagcaagcaaaaacagcggattgtctcttctaacagcacgccgaagtcaattgttgtcacattacaatcgatttatttttctcctttagcctcaggcacgttgaaaaaacgggcgcaatccaagccggaaatcgattcataaagaatcttaactataaatttattatgtttgaagaaaagtgtaggtgaatgtgcgtggcaatggaacagcaaaataattacgatgaaaatcagatacaggttctagagggattggaagccgttcggaaaagacccggaatgtacatcgggtcgacaagcggcaaaggtctgcaccatttagtatgggaaattgtcgataacagcatcgatgaagcattggccggttactgcactgaaatcaatgtcgcaattgaaaaagacaacagcatcacagtaaaagacaacggacggggtatcccggtcggtattcatgagaagatgggtcgtcccgctgtggaagtcatcatgactgtcctgcacgccggaggaaagtttgacggaagcggatataaagtttcgggcggtttgcacggcgtcggtgcttctgttgttaacgccctttcaaccgagctggatgtaacggtttacagagatggaaaaatccattatcaggaatttgaacgtggcgttccgaaagctgatttgaaagtcattggagatacggaagtgacgggaacgaccacacacttcaagcctgatccggaaatattcacggaaacgactgaatacgactatgatacgctcgccactcgtgtccgcgaactcgctttcttgacaaaaggcgtcaaaatcacgatcgaagacaagcgagaaggaaaagaacgcaagaatgaatactgctatgaaggcggtattaaaagctatgttgaacacttgaaccgttcgcgggaagttattcatgaagagccggtctatattgaaggatccaaagacggcattacagtcgaggtggctcttcaatacaatgacagctatacaagcaacatttattcatttgctaacaacattcatacgtatgaaggcggaacccatgaagccggctttaagaccggtttgacgagggtcatcaatgattacgcgagaagaaacggcgtattcaaagaaagcgatccgaacttaagcggagaagacgtccgggaaggtttgacagcgattatttcaatcaagcacccggatcctcaatttgaagggcagacgaaaacaaagctcggcaactcagaagcgcgtacgataacagatgcgctattttcagaagcgcttgaaaagtttctgctagaaaacccggattcagcgaaaaaaatcgttgaaaaaggggttatggccgccagagcacggatggctgcaaagaaagcacgcgaattgacgcgcagaaaaagcgcccttgaagtgtccaatctgccggggaaacttgctgactgttcttctaaagacccgacgatttccgaactttacatcgttgagggtgactctgcgggcggatcggcaaaacagggccgcgaccgtcatttccaagcaattttgcctttgagagggaaaattttgaacgtcgaaaaagcccgcctggacaaaatattgtccaacaatgaggttcgttctatgatcaccgcccttggcaccggaatcggggaagatttcaaccttgaaaaagcccgctaccacaaagtcgtgattatgacggatgccgacgtcgatggtgcacacatcagaacattgctgctgacctttttctaccgctacatgagacagattatcgaacaaggatatgtctacatcgctcagccgcctctttacaaagtacagcaggggaaacgcgttgagtatgcgtacaatgaccagcagctcgaagaaattttaaaagagcttccgcaaaatcctaagccaggcctgcagcgctacaaaggtttgggcgagatgaatgcgacacagctttgggaaacgacgatggatccagaaacgcggacattgcttcaagtaacgctcaaagatgcgattgatgcggatgaaacctttgaaatgctgatgggcgacaaggttgaaccgcgccgcaacttcatcgaagagaatgcccgatatgtaaagaatttggatatttaatgattgtaagaccttattttcgcttaattgaaataaggtcttttctagaatgagcctttggcgctctagtcatttgatgtgtataaaatcaagattattgatataatggagaatagcctaattcgttgaagagtataaatacaaatctactcccacacaactcatgtagattctccagggaggttttttaatgagtgaacaacataagccccaagttcaggaagtcaatatcagtcaggaaatgcgcacatcttttttagattacgcaatgagtgttattgtttcccgcgctcttccggacgtaagagacggtctgaagccggtgcacagaagaatattgtatgcgatgaacgaccttgggatgacaagtgataagccgtataaaaaatccgcgcgtattgtcggcgaagttatcggtaagtaccaccctcacggtgattctgctgtttacgaagccatggtcagaatggcgcaggattttaactatcggtacatgctcgttcaaggccatggaaacttcggttctgttgacggcgactcggctgcggccatgcgttacacagaagcgagaatgtctaaaatatcaatggaaattctgcgcgacatcaataaagacacaatcgattaccaggacaactatgacggttcggaaaaagagccggttgttatgcctgcgagatttccgaacttgcttgtcaacggagcggccggtattgctgtaggtatggccacaaacatcccgccgcatcagctcggtgaagtcattgacggtgttttggcggtcagcaaaaaccctgatatcacgcttccggaattgatggagatcattcctggacccgacttccctacagcagggctgatcttgggaagaagcggtatccgaaaggcctatgaaacaggccggggatcaattacgcttcgagccaaagctcaaatcgaagaaacatcttccggcaaaccggtaatcattattacggaaataccgtaccaagtgaataaagcaaggctgatcgaaaaaatcgccgatctagtgcgcgataagaaaatcgacggcattacggatctccgcgatgaatcagaccgaaacggaatgcgcatcgtcattgaactgagaagggatgcaaatgccaatgtactgttaaataacttgtacaagcagaccgctcttcaaacatcattcggcattaatcttttggcgcttgttgacggccagccgaaagtattgagcttgaagcagtgtctggagcattatctcgaccatcaaaaagtcgtgatcagaaggcgtactgcattcgagcttcgcaaagcggaagcgcgggcccatattcttgagggcttgagagtggcgcttgatcaccttgatgaagttatttccctaattagaaattcgcaaacggctgaaatcgcaaaaaacggattgattgagaagttttctttgactgaaaaacaggcccaggcgattttggacatgcgtctccagcgtttaacagggctggaacgcgaaaaaatcgaagaggaatatcaaagccttgttgagctgattgcagagctaaaagcaatcttagcagacgaagagaaagttcttgaaatcattcgggaagagctcacagaagttaaagagcgctttaatgatgagcgccgtactgaaatcgtgacatcgggccttgagacgattgaggatgaagatctcatcacgcgcgagaatatcgttgtgactttaactcataacggatatatcaaacgtctgccttcttctacttaccgcagccaaaaacggggcgggaaaggcattcagggcatgggtacaaatgaagacgacttcgttgaacacctgatttcaacatccacccatgacaccattctcttcttctcgaataaagggaaggtgtaccgtgcgaaaggatatgagatccctgaattcggacggacagcgaagggaattccgattattaacctgcttgaagtggaaaaaggagaatggatcaacgcgattattccggtaggcgaatttgatgacgagtcttatttgttcttcacgacaaaacacggaatatcaaaacgcacaccgctttctcaattcgcgaatatccgcaataatggattgatcgccttaagcctccgcgatgaggatgaattgatcgctgtccgcctgacggatggaaataaacaaattattatcggcacgaagaacggtctgctcatccgtttccctgaaacagatgtaaggcaaatgggaagaacagcagccggcgttaagggcatcaatctgacagatgacgatgttgttgtcggcatggagattttggaagaggattcacacgtgctaatcgtaactgaaaagggctacggaaaactgacgcccgcttcagaatacagggtgcaaagccgcggaggaaaagggctgaaaacctgcaaaatcacagaaaataacggatctcttgtgacagtgaaagcaacgacaggagaagaagatttaatgatcatcacagcaagcggcgtgatcattcggatggatattaaagatatctccacgaccggacgcgtcactcaaggtgtgcgacttatccgcttaggtgaacaagagcatgtcgcgactgtcgctttagttgaaaaagatgaagagaacgattcagaagaacaggaagcggatgaatcataaaaacatgcagccaaatggctgcatgtttttctattcaatctttcaaatataatcttttcatcaggaacataatgtgctataatttctcttggtcgcttataaaaacaacaacaaaaactttttcaaaaaaagtattgaccgcttgtctcataaatgttatatttaagtggtcgctttgagagcggcagcgaagttctttgaaaactaaacaagacaaaacgtacctgttaattcatttttataaatcgcacatttgagtgtgcgtagtcaggggcctgcacgatgcaggtcatgcagatgttgtcacaggatgtgacgaacttaatctgcgctccattatttcatggagagtttgatcctggctcaggacgaacgctggcggcgtgcctaatacatgcaagtcgagcgggccgacgggagcttgctcccttaggtcagcggcggacgggtgagtaacacgtgggtaacctgcctgtaagactgggataactccgggaaaccggggctaataccggatgcttgattgaaccgcatggttcaatcataaaaggtggcttttagctaccacttacagatggacccgcggcgcattagctagttggtgaggtaacggctcaccaaggcgacgatgcgtagccgacctgagagggtgatcggccacactgggactgagacacggcccagactcctacgggaggcagcagtagggaatcttccgcaatggacgaaagtctgacggagcaacgccgcgtgagtgatgaaggttttcggatcgtaaaactctgttgttagggaagaacaagtaccgttcgaatagggcggcaccttgacggtacctaaccagaaagccacggctaactacgtgccagcagccgcggtaatacgtaggtggcaagcgttgtccggaattattgggcgtaaagcgcgcgcaggcggtttcttaagtctgatgtgaaagcccccggctcaaccggggagggtcattggaaactggggaacttgagtgcagaagaggagagtggaattccacgtgtagcggtgaaatgcgtagagatgtggaggaacaccagtggcgaaggcgactctctggtctgcaactgacgctgaggcgcgaaagcgtggggagcgaacaggattagataccctggtagtccacgccgtaaacgatgagtgctaagtgttagagggtttccgccctttagtgctgcagcaaacgcattaagcactccgcctggggagtacggtcgcaagactgaaactcaaaggaattgacgggggcccgcacaagcggtggagcatgtggtttaattcgaagcaacgcgaagaaccttaccaggtcttgacatcctctgacaaccctagagatagggcttccccttcgggggcagagtgacaggtggtgcatggttgtcgtcagctcgtgtcgtgagatgttgggttaagtcccgcaacgagcgcaacccttgatcttagttgccagcattcagttgggcactctaaggtgactgccggtgacaaaccggaggaaggtggggatgacgtcaaatcatcatgccccttatgacctgggctacacacgtgctacaatgggcagaacaaagggcagcgaagccgcgaggctaagccaatcccacaaatctgttctcagttcggatcgcagtctgcaactcgactgcgtgaagctggaatcgctagtaatcgcggatcagcatgccgcggtgaatacgttcccgggccttgtacacaccgcccgtcacaccacgagagtttgtaacacccgaagtcggtgaggtaaccttttggagccagccgccgaaggtgggacagatgattggggtgaagtcgtaacaaggtagccgtatcggaaggtgcggctggatcacctcctttctaaggatattatacggaatataagaccttgcggtcttatagacaggtgcgtttggatcttgtttagttttgaaggaacttccttcatatgaatcaaaagatgggcctgtagctcagctggttagagcgcacgcctgataagcgtgaggtcggtggttcgagtccactcaggcccaccatctttatacacggggccttagctcagctgggagagcgcctgctttgcacgcaggaggtcagcggttcgatcccgctaggctccaccaacgtgttctttgaaaactagataacgaaagtagacattcacattcaattgtaatgcaagatatcacgtagtgattctttttaacggttaagttagaaagggcgcacggtggatgccttggcactaggagccgatgaaggacgggacgaacaccgatatgcttcggggagctgtaagcaagctttgatccggagatttccgaatggggaaacccactgctcgtaatggagcagtatccatatctgaattcataggatatgagaaggcagacccggggaactgaaacatctaagtacccggaggaagagaaagcaaatgcgattccctgagtagcggcgagcgaaacgggaacagcccaaaccaagaggcttgcctcttggggttgtaggacactctgtacggagttacaaaagaacgaggtagatgaagaggtctggaaaggcccgccataggaggtaacagccctgtagtcaaaacttcgttctctcctgagtggatcctgagtacggcggaacacgtgaaattccgtcggaatccgggaggaccatctcccaaggctaaatactccctagtgaccgatagtgaaccagtaccgtgagggaaaggtgaaaagcaccccggaaggggagtgaaagagatcctgaaaccgtgtgcctacaagtagtcagagcccgttaacgggtgatggcgtgccttttgtagaatgaaccggcgagttacgatcccgtgcaaggttaagtttgaaaagacggagccgcagcgaaagcgagtctgaatagggcgcatgagtacgtggtcgtagacccgaaaccaggtgatctacccatgtccagggtgaagttcaggtaacactgaatggaggcccgaacccacgcacgttgaaaagtgcggggatgaggtgtgggtaggggtgaaatgccaatcgaacctggagatagctggttctctccgaaatagctttagggctagcctcaaggtaagagtcttggaggtagagcactgattggactaggggcccctaccgggttactgaattcagtcaaactccgaatgccaaagacttatccttgggagtcagactgcgagtgataagatccgtagtcgaaagggaaacagcccagaccgccagctaaggtcccaaagtatacgttaagtggaaaaggatgtggagttgcttagacaaccaggatgttggcttagaagcagccaccatttaaagagtgcgtaatagctcactggtcgagtgactctgcgccgaaaatgtaccggggctaaacgtatcaccgaagctgcggactgttcttgcgaacagtggtaggagagcgttctaagggctgtgaagcgagaccggaaggactcgtggagcgcttagaagtgagaatgccggtatgagtagcgaaagaggggtgagaatcccctccaccgaatgcctaaggtttcctgaggaaggctcgtccgctcagggttagtcgggacctaagccgaggccgaaaggcgtaggcgatggacaacaggttgatattcctgtaccacctcctcaccatttgagcaatggggggacgcaggaggatagggtaagcgcggtattggatatccgcgtccaagcagttaggctgggaaataggcaaatccgtttcccgtaaggctgagctgtgatggcgagcgaaatatagtagcgaagttcctgattccacactgccaagaaaagcctctagcgaggtgagaggtgcccgtaccgcaaaccgacacaggtaggcgaggagagaatcctaaggtgatcgagagaactctcgttaaggaactcggcaaaatgaccccgtaacttcgggagaaggggtgctctgttagggtgcaagcccgagagagccgcagtgaataggcccaggcgactgtttagcaaaaacacaggtctctgcgaagccgtaaggcgaagtataggggctgacgcctgcccggtgctggaaggttaagaggagcgcttagcgtaagcgaaggtgcgaattgaagccccagtaaacggcggccgtaactataacggtcctaaggtagcgaaattccttgtcgggtaagttccgacccgcacgaaaggcgcaacgatctgggcactgtctcaacgagagactcggtgaaattatagtacctgtgaagatgcaggttacccgcgacaggacggaaagaccccgtggagctttactgcagcctgatattgaatgttggtacagcttgtacaggataggtaggagccttggaaaccggagcgccagcttcggtggaggcatcggtgggatactaccctggctgtattgaccttctaacccgctgcccttatcgggcagggagacagtgtcaggtgggcagtttgactggggcggtcgcctcctaaaaggtaacggaggcgcccaaaggttccctcagaatggttggaaatcattcgcagagtgtaaaggcacaagggagcttgactgcgagacctacaagtcgagcagggacgaaagtcgggcttagtgatccggtggttccgcatggaagggccatcgctcaacggataaaagctaccccggggataacaggcttatctcccccaagagtccacatcgacggggaggtttggcacctcgatgtcggctcatcgcatcctggggctgtagtcggtcccaagggttgggctgttcgcccattaaagcggtacgcgagctgggttcagaacgtcgtgagacagttcggtccctatccgtcgcgggcgcaggaaatttgagaggagctgtccttagtacgagaggaccgggatggacgcaccgctggtgtaccagttgttctgccaagggcatcgctgggtagctatgtgcggacgggataagtgctgaaagcatctaagcatgaagcccccctcaagatgagatttcccattcctataaggaagtaagatccctgaaagatgatcaggttgataggtctgaggtggaagtgtggcgacacatggagctgacagatactaatcgatcgaggacttaacctaaatatttgtgaatcgtctgtccgttatctagttttgagagaatgctctcagaaagccaaaggcaaggaaactcggctaaaggccctcacatcctgtgaggaacgcccagtaccttcgtcctgaaggcatagtttggtggcgatagcgaagaggtcacacccgttcccatgccgaacacggaagttaagctcttcagcgccgatggtagttgggggcttccccctgtgagagtaggacgccgccaagcgcttagaggaccagcttatataagctggtcttttttgttgttttctttttttcgaataagcaattcagcgatataataagggaactttgactcgactatatgtaaaaactgttggatgatgacataatcatcgctggcactttgaagaagaaggtcataccaccattctgtttcatacctggcaatcatgcttaaattgtaagcaaccaagtaatgcaccaatatttccgggagctttaaaaagcgatcccgttcagccggaaaataatatgcgccatgttccaaatcataaagcaaggtagtcgaagtgctgggacggcattctttttgagcggcggaaaaaatgatcccctctttttcttcacggcagaaagaccagtttaaatggtattcgacatgttcgatgaaacgctttgacgacatattgtaagcatcgggcgtctcgcttggcagccaaatgagccggtcttcgacggctgcttttactattggattcggttttctttgaaatgccagtactttattgatctccggaattctcgccaaaagctgcttcatattgaatcgttcatcttccaatccggataattggaaaagggacctgatgacgtgcatacataggccgttcctttggatttttacttcatcttcataaaagcggtaattttgtttttttcgttttctagtggtcacgccatgggcgagcactgaagtatggcttggataggaaggatctgtcgttaacaggcaggctttcaatagctgtgccatgccgtaaaataataaaatcggtttgatttccaacgtagcgattttggcttgcttgtaaaagccttccgcatgtttaagaaaaaaaataaaccgctctccgtttttataggaattttttttggcatcttccattccttgatttttatataccatttcaagaaaatgctgggctgtttcgaccgaataaaatagctttaaatccttccatcctttatcttgcatggactccacttcccttatggttattttctaaaaattacaactgtttctcgctttcttgacagtgggtattcaagttgataatctacatataatattttgccgaaaagagggggatttactaatgtgggaaagcaaattttcaaaagaaggcttaacatttgatgatgtattgctcgttccggctaaatcggaggtacttccgcgcgacgtcgatttatcggtagagcttacaccgtctctcaagctgaatgttccaattattagtgcaggcatggatacagttacagaagctcaaatggccatcgcgatggcaaggcagggcggactgggtattatccacaaaaacatgtcaattgaacagcaggctgagcaggttgacaaagtcaaacgttcagagcgcggcgtcattacaaatccgtttttcctgacaccagagcaccaagtttttgatgcagagcatttgatgggcaaatacagaatttccggtgttccgattgttgacaatgaagaggatcagaagctggttggaatcattacaaaccgtgatctgcgatttatttctgattactccatgaaaatcagcgatgttatgacaaaagaagagcttgttacggctcctgttggtacaaccctggatgaagcagaaaaaattcttcaaaaatacaagatcgaaaaactccctcttttagatgatcaaggtgttttaaaagggctaattacgattaaagacattgaaaaagtaatcgaattcccgaattcagcgaaagatgttcacggccgcctattggttggagcagcggttggtgtaacaggcgacacaatgacacgcgtcagaaagcttgtggaagccaatgtcgatgtgatcgtcgttgataccgcgcacggccattcacaaggagtattggataccgttaagaaaatccgcgacacttatcctgaattaaatatcattgccggtaacgtcgcaactgccgaaggaacaaaagcgcttatcgaagctggagcaaatgtagttaaagtcggtatcggaccggggtcaatttgtacaacccgcgtagtagccggtgtcggtgttccgcaagtgacagcgatttacgattgtgcgactgaagcaagaaaacacggcgctgcgattattgcagacggcggcatcaagtattccggagatattgtcaaagccttggctgccggcggtcatgccgtcatgctaggaagccttcttgccggaacatctgaaagcccgggcgagactgaaatctatcaaggcagacgctttaaagtttatcgcggcatgggttctgtagctgcgatggaaaaaggaagcaaagaccgctacttccaagaggaaaacaaaaaattcgttcctgaaggcattgaaggccgtacgccttataaaggccctgttgctgataccgtttatcagcttgtcggcggtttgaaatccggcatgggctactgcggaacgaaagatttgcacgcattgagggaagatgcgcagttcatccgcatgacaggagcaggcctgcgggaaagccatcctcacgatgtgcaaattaccaaagaatcgcctaactataccatttcctaatcaaatatgacaaaaattaaaccgtagacagagtgatactctgtcttatttttttttgtcttcattatgataaaatttataatgttgtgtttgaaaaatgtcttaaaaggctttgatatagattattagtctgatgaaaagcggaggtatcacgatttgaaaagcaagagattaaagcagctgatcatgttaatcgttgcttttgccgtgactgtaggtgcattttctcctatgtcaactgcaaaagctgcaaatgatccaatcaatgtagacgcgaaagcagcaatcctggttgaagcttcatcggggaaaattttgtacagtaaaaatgccgaccagcgtcttcctgttgccagcatggcaaaaatgatgacggagtatcttctgttggaagcgattcacgaaggcaaagtgaaatgggatcagaagtacacgcctgacgattatgtatacgagatttcccaagatcgttcactatccaatgttcctcttcgtaaagacggatcatacactgtaaaagagctttatcaggcgactgcaatttactctgcaaacgcggcggctattgcactttctgaaattgttgccggttctgaatcgaagtttgtagagttaatgaacaaaaaagccaaagagcttggaatgaaagatttcaaatttgtgaatgccacaggtttggaaaacaaggatcttcacggcaaacatccgagcggaacaaatgccaatgaagaaaatgaagtgtctgcgagagacatggcgctccttgccgatcatttagtgagcgattatccagagatcctcgatacggcgagcattgccaaaacgaagttcagaaaaggcacagacgatgaaatggatatgccgaactggaactttatgctgaaaggccttgttcagcaatatgaaggtgtggacgggctgaaaaccgggtcaaccgactcagccggatcatgctttacggctactgctgaaagaaatggcatgagagtgatttccgtcgttctgaatgcgaaaggcgaccttcatacggcgcgatttaaagaaacgaaaaaaatgctcgattatgcatttgaaaacttcactatgaaagagttttacgcaaaaggcgcacaagtgaaaggcaacgaaacagtcacagtcgacaaagggaaagaaactgaagtcggcatcgtcacagaaaaagccttttcaatgcctgtgaagaacggtgaagaaaagaattacaaagcgaaagtgacgctgaacaaagacgagctgaccgcacctgttaaaaaaggtgagaaagtcggtaccttgacggcctcctataagggagaagaaaaggactacggatttctcggcagcgatgtatcaggtgtaaacctggtgacaaaagaagatgatgagaaagcaaactggtttattttaacgatgagaagcatcggcggctttttgccggtatatggaacagcattgttgaaatggtaaccggctggttttaaaaaataaagagctctatttgatagggctctttattgtcatattcagatagaattaccatttacaatcctaacgatttgttattaaaatagaaataatcttcgtgtttttcatatgattttgtggaattataggatacaataggattaaatctgacaattcaatctttgattagggggatccttgaaatggctcaaacaggtactgatcgcgtaaaacgcggtatggcagaaatgcagaagggcggcgtcattatggacgttgtcaatgctgaacaagcaaaaatcgcagaagaagcaggagccgtcgcagtcatggcgctggagcgcgttccggctgatatccgtgcggcaggcggagttgcccgcatggcagatccgactattgtcgaagaagtgatgaacgctgtttcaatcccggttatggcaaaagcacgcatcgggcatatcgttgaagcgcgtgttcttgaagcgcttggcgttgactatattgatgaaagtgaagttttgactcctgcagatgaagaatttcatttaaataaaaacgaatttaccgttccatttgtatgcggatgccgcgacctaggagaagcgacgcgccggatcgctgaaggagcttcaatgcttcgtacaaaaggcgaacctggtacgggcaatattgtggaagctgtccgccatatgagaaaggtgaatgctcaagtgcgcaaagtagtcggcatgagcgatgacgaactgatgacagaagcgaaaaacctcggcgctccttatgagctgctgaaggaaattaaagccgaaggacgccttccggttgtcaactttgctgccggcggtgtagcaacacctgctgatgctgctctaatgatgcagcttggcgctgacggcgtattcgtagggtccggtattttcaaatccgacaaccctgcaaaattcgcgaaagcaatcgtagaagcgacgacgcatttcacggattacaagctgattgccgagctttcaaaagagcttggaactgcgatgaaagggattgaaatctcaaatctgctgccagaacagcgtatgcaagagcgcggctggtaaacacgaaggagacggattgacatgctgacaattggtgtacttggacttcagggagcagtaagagaacacattcgctcaattgaagcatgcggagcggccggaaaagtcatcaagtggccggaagagttaaaggaaatcgacggtttgattttgccaggaggcgaaagcacgacgatgaggcgcctcatcgatacgtatcagtttatgaagcctcttcaggaatttgccgcatccggaaagccggtatttggaacttgtgctgggctgattatcctggcgaagaacattgccggaactaacgatgcccatctcggggttctggatgtaacggtagagcggaattcctttggaagacaggtggacagctttgaagcagacttaaccgttaaaggacttgagggaccgtttacaggcgtatttatccgcgctccgcacattttggaagcgggcgcagatgtagaagtgctttcggaacacaacggaagaatcgtcgctgccaaacaaggaaatcttctcggctgttctttccaccctgagctgacggatgatcacagaatgacgaaattatttgtcgagatggtggaaaagcataaacgggaagccgtcgtataaaacggttgaaagctgttaaaacttgtagtacatttataagacaatatagatcgaaaagcgttgataggaagcagtaggaagcctctctttccaagagagccgatggttggtgcgaatcggcgaaagatgctgtccgaatccatccttgagcgaaatgctgaacagtcaaagtaggcatttacgggagaaccgttatcaaaataagcggaaagcaggaggtagacgcctgttttcaatcagggtggcaacgcgagagctctcgtcccttttatttaggggacaagggctctttttttcggtcaaatcagtataaaaggagcgaggcagatgcttgatgtcaaactgctgcgggcaaattttgaagaaatcaaacaaaagcttgcccacaggggagaagatttatcagattttgatcaatttgaggaattggatacaaagagaagagaattgatcgtcaaagtggaagagctgaaagggaagcgcaatgaggtatctcagcaggttgccgctttaaagcgcgagaaaaaagatgctgaccacctcattaaagaaatgcgcgaagtcggtgaagacattaaaaaacttgatgaagagctgagaacggtcgagtcttcgcttgataaaatcatgctgtctatcccgaacatcccccacgagtctgttccggtcggtgagactgaagacgacaacgtggaagttcgcaaatggggcgaactccctgagttttcgtttgagccgaagcctcattgggatattgccgatcaattggatattctcgattttgaacgggccggcaaggtaacgggaagccgtttcgttttctataaagggctcggcgccagacttgaacgcgcattgtataactttatgcttgatctccacgtagacgagtacggctatacggaagtcatcccgccgtacatggtgaaccgcgcaagcatgacaggcaccggacagctgccgaagtttgaggaagatgcttttaagatcagggaagaagattatttcttaattccgacggcggaagtgccgattacgaacctgcatcgcgatgaaattttgtcagctgacgagctgccgatcaattatgcggcgttcagtgcgtgcttccgttcagaagcaggctctgccggacgtgatacgcgcggtttgattcgccagcaccaatttaacaaggttgaactggtgaaatttgtgaagcctgaggattcatatgaagagcttgaaaaactgacaaatcaagcggagaaggttcttcagctgcttgagcttccttatcgggtgatgagcatgtgtacgggcgatctggggtttaccgctgcgaaaaaatacgatattgaagtatggattccaagccaaaacacatatcgcgaaatttcatcatgcagcaactttgaagctttccaggccagacgggcgaatatcagattcagaagggaagcaaaaggcaagccagagcatgtccatacgctaaacggatccggcttggcagtcggcagaacggttgccgcattattggaaaattatcagcaggaggacggaagcgtcatcatccctaaagcgcttcgtccatatatggggaacagagacgttattcaaccataaaaaagtgcgcgccaataggcgcgctttttttattcgagtgaccagacggcggctacatttcgcgcacagcgcgtaagatttgaacttccatcggcaagagcgttctccaaggagctgatgccgggcacgatcgaaaagagagcggaaatgccgatatcataaacaagctcgcagccttcaccgagcgatccggcaaatgcaataaccggaatattttcgctgcaggcgcgttttgcgacgccggccggcgtttttccgctgaccgtttggccgtctatttttccctcgcctgtaattacaagatcggcccctttaatgcgttcagaaaaagacaaagtatctaaaacaatgtcaacaccgctttttaattccgcttttaaaaaggcgcacaggccagctcccaatcctccggccgctccggctcccgggagtgaatcgatttcgcatcccagctctgctttgacagctgcagcataatgttttaagttttgatccaagtgggccgtcatttcactgttcgctcctttttgcggcccaaatacagcggaggcaccgcgaggacctgtaagaggattatcaacatcacaggcggcttcgaattggatatgctttaattttggatcaaggccgctcacatcgattttggcaatctcagctagtgcaccgctcccattttcaatctcttctccagcgcggtttagaaacttcacgccaagtgatgaagccattcccgcgccgccgtcatttgtcgcgcttccgccgagtccgatgatgatctgggacactcctttttccgcagcatccagaatcagctctccggttcctctcgttgttgttaacaggggattccgctgttcaggtggaacgaggtgaaggcctgacgcttcagccatttcgatgacagccgtttttccgtcaccaagcaggccgtaagctgcctttacgggcttcccgagagggccagtgaccgtttgatatacaatatctcctccggtagcgtcaaccagagcctgaacggttccttcgcctccgtcggcaaccggaatattgacgtattcggcgtcaggcagaatctctttaaagcctttttcaatgcttctagccgcctcaagcgatgtcatgctttctttaaatgaatcaggtgcgattacgattttcatggtacctgctcctttttaaataaagaattgaaaaattccaaaaatcaaagtcgagataatcgttaggattaagccgatgaccgactcatatggaatcagctttaatcgttctttcatggccatgaatacgctgcctcccgtcgtatgaaaaaagcttccgtgaggcagatggtcgagcaccgttgctccggcgtgaatcatcgctgcacctgcgaggccggcgacgccaagatcaagcaatgtcgggccgaatacgctgctggcgacagcggtgccggcggttgtcgaggcggttgccattgacatcagcatgcccgagattggagccaagagaaacgacggcagacccaagccgacaagggtgtcggtgattaaagaattgagtttggagttggcgatgatgcctgcaagggttccagtcccgagcagcatcacggcaacgcctgacatctttgacagtcctgaagcggcaaaatccctcagtttgcccgcttgccccgatgcgatcgcagtgacgaggcctccagccggcagagcgataatcggatcaatcgtaattcctgccgcaggccttaaggcgagcaacaggatagagaccacagggccgctgaccgccgcccaaaatgccggcagttgttgtgccgtttgggtctcaatctcatttgcagctacttttgttcctttatttgaaaggcgttttgccagcaagtaagtggcgcccaatccgaaaatagcggggatgatcccggcggccatcacggatgtcaaagggacgtgaaaggcatctgaagcggcaatggcattagggtttggcgacatgatattgcccgcttttcccccgccgatcatcgccaacagaatggccgctttgctgataaaggtccgcctcgcgatcgccagagcgatcggagcgactgtgatgacggcgacatcaacgaatacgccgaccgttgttaagatggctgttgccaatgttaaggcaagaagcgcccttttttctccgatctgattgacaatggtttccgcaatcaccgctgcggagccggattgaatcagaacgccggcgagcacgcctgccgccaagatgcggagcaccgcgggaatcatgtttttagcacctgctatcatgagatccgtcgtctctattaaatctgcgccgccgattaagcctccggccaatgcgccgatcatcatgccgtaagccggcgggacttttttcagaatgagaaagattgatatgactaatgcgcataaggcgcctattgcattgatttgaatatccatgtgcataccctcccttacgtccaattgtaaacgctttctgtataagggagaattggtcaggtatacggatttcgtccttttatcctatattaaaattgttcatttgcacaaaagggtgaaaaaagagtaatggctgtatacagtttgaataggtcgtcaaaccgttttggattacaccccgttgccaattcaatctttctgagccggtagtttaaggtgttgcggtgaataaagagtcttgatgaagtttccccgatttcgccgttttcttctatgtagcagaggagggtatgagttaattcgcctttttgatctgcttgggaaaggcgatgccagatgttttgaaagtgaatctcctgatccggatgctctatttttgataataaaacaggaatcgcaaactctcgataatcgtataaactacaattgttttcagcaatcttgagcgtttgttttgcactttgataggaaaatggcagctgctgaagctggtcagcctgctcgccaagcgcgcctctgactgttttccattggctgagccagccgttccaagctgaaaagagatcagacctgcttttagtgggggcgcctgccagaataactgcgacctcttttaaagaaatattggcgtacaaatctttcgcggttaaatgcttttcaagttttttaataaacgccggcttcatatcagccgatgggagctcaaacacaagacaagtacgctggccgtcaagcggtatgtttaatcgctctgcacgttcaaagaagtcaagggatgctagatcagtcccctgaatcatttggatgaccgtttcttcgcggagcctttgatcccatgtcagctgttttgttaaaaatgcctgttcgactgttagctccgctgccattttgacaagttctccgtaacggctgacttcagaaggcggccccgtgattccaatgacgccgattatttcatcatgaaatacgatgggaaggtttacgccgggcttcgttcccgttaaagccgagtattcttcgggcgtgatgctgataaccttttcagctgcaagtgcgtccttcgctcctgcgtgttcatcaccgattctcgaacggtctcctgaagcgatgataaccccgttttcatccatcatattaatgttgtgccgaataatcgacatggttctttcgacaatttcctccgccaattcttttgataggtaattcatttcatcatgctcctgcctaagatcgttttttaaatggtgattgttccgtcgatccagccttttatgaatgattttaaagaaggtgcgacccatattcggctgtcgtctatatgattccaaacataaatatcatttttccgtatggagccgtttaaaatagaataagcaaattaatcgccattgcccgcacctgctataaagagcagacaatcaaacggcttaaaacagtcggtacatctcatgtctagattctcttctattattctgtccgcaggccaaatgagatgatccccgaaagtatcattaatgccgtttgtcatttttaaaaggctgaccagttcatcaggaaaagagacgccgaggagttcttctgctttctgaagctttcctgtttcaataggtctgttcagcgtgtaatcttgaggcaaacggcttataaaatgtttccacaatgccatcaccctttgcgtttattattatttttgcatataatgagaagcgtgaacaataaaataaattttttataaaaaaatcccttgacttaaaaagataggacatgttatattaattcttgtcgatacggaggaatacccaagtctggctgaagggatcggtcttgaaaaccgacaggggtgtcaaagcccgcgggggttcgaatccctcttcctccgccattattgatttgcattttagtgattgaaaagcataaattggagattgtgttgccgctgcctggatagggcagcggtttttttatatgcagcaaaaagagcggctcttcaagggaatccgctctttttgcttgtttatctttgaatggcttcactgattttttcaatgattggatcgagagaggctgagttgttgaacaggtcgtattcatcaatattgactctgacaaccggacaggcgttaaatccgctgatccagttttcatacctagtgtacatttcttcccaatacgatctgtcggttaacagttccatttcccgtccgcgtttttggatgcggtcgagaatcgtttccaaatcgccctctaaatagactaaaacgtcggggcgggggaagtaaggcgtcatgaccatcgcttcaaacaggctcgtatacgtcttatagtcgacttttgacattgtgcctttatcggcgtgcattttggcgaaaatgcctgtatcttcataaattgaacggtcctgaacaaatccgccgcccgattcgtaaatgtatttttgttctttgaagcgctctgccaagaagaaaatctgcaggtgaaagctccagcgttcaaagtcttggtaaaaagcctccaaataagggttattcacgacctcttcaagagaggttttaaatccgagcctttttgcaagctcttttgtcaatgtggatttccccactcctaccgttcctgcaacagtaatgatagcatctttcggaatatcatatacactcattctatatactcctttacttgatcggcaattcgattgaaaacggcttctgagattacgaagtcttcctgatctccgttaatttcaatgacgggtattggcggatcggattctttaaattgcttaatggccgcctcataatcattgataagctgttccaggtattgcttgtccatttcttgttcaaacggccgtccgcgttttttgatccgttccaataaagttggaagactcgctcttatgtaaatgatgacgtttggtttcggcagatcttctgtaagcagctgataaatttttctgtatttctcaagttttttgccttccagcgtccgttcggcaaaaatgaggtttttataaatatgatagtccgaaacaacgggcatgtgatgatgcaaatactttttctcggtttcttcaagctgcttatagcgattgcagaggaaaaacatctcaagctgaaagctccattcatctttttcatcataaaatttatcaagaaaagggttttcttcgacgatttctttgaccaaagagagtgagagcttttcggagagcatgctggccaaggttgtttttcccgcgccgatggggccttcgacagcaatgaaaggggctgtattcataggtgtcctcctactaaagaaattcatttgtgaaccatacatattgtatcacatcatcatccgctgccatgaaaaaaacgttcctttaacttgggaacgtctctttcacaacattaaattgatcggctatcaagagccagttttgcgggaaggacaggccgagcttccaatagctgattccccttaaattcaattccctaatcagatcaaactttgcctgaatcgagcgggcgtcttcaaaccatacttcatgctgtttgccggcattgtccgtatagcggaagtttggagcctgagctgtttcatcgtactgtatcgccgcattgttctcgctcgcgatctcaatcgcccgctgggggctgattgctctggccagcggtccgcctggcgtataggggagcgtccagtcatagccgtacaagttctgtcccatgacgattttgctggcgggcatttccgtgagtgcgtattcgatcacgtcccggacgggcccgatcggcgataccgccatcgggggccctccgctgtagccccactcatatgtcatcagcacgacgaaatcgacaatttcgccgtgggcccggtaatcatgggcttcataccattgtccgggctgatccgctctcgttttcggagcaagcgcggttgagatgagccagccttcctgcctgaagcgggcccgggcatcccgtaaaaactgattataggcttctctatcttcgggccttaagtattcgaagtcaaaatggatgtctttaaaaccgtatcttctggccgctgcaacgatgttatcgagcaatctgttttttacattctggtccgtcagaatgatcctgccgagttcgtcgctgaaagcttcattttcgagattggtgacaatcatcatcatcgtagtccgatgtctgtcggcaatttcttttaagttgttcagcggcggttcttcgagtgtgccgtcccgcttcgcctggaagctgaaagcgcccagataggtcaagtatggcgaagcctctcttgccgcctgctgcaaagtggggcttacgctttctccccgaggttcgatataggcgtttgtttcaatgttccgtcttggccgaggggggatgtaaagcagcagtccgaccggtaaaacggcgctaacctgaatgcggttgatcctcgccagttcagccggagaaatattaaagcgtgctccgattgatgctaatgtatctccctgtctgacctcataaaactcgccggcgatcgggatcacgatggtttgtccgacaacaagccgattcgggttcggaatttcattcgtcgcgacaatttcattaactgttgttcggtaacgattcgcgatttggtaaagggtatcgcctcttttcacgacataaatctgaatgggaaacgcctcctttctcattgctaccactatatgatgaaaggaagtgtttcatgctctaagtttcggaggtaatcgccttagccgtcgtgatattggcgaacagaacattttccatcatcgtcaaggcgtatttgttgtctttttcattgtttgaggcgatgcaatcgcgcggaatcgtaatctcgtactcccgcatataagcatcgtttgccgtaaataatacgcagatattgcctgcgatcccagtgatgatcaaatgatcgacatgaagttcatgcagcaatgtttcaagagcagtgccgtaaaaggctgagtgctttggtttgattaaaaaataatcgctgtcattcggtgcaagccggtcgatgatatattcgctcctgccgtttttgcatttcttgataatggcagcaatatccgcttgccaaattccaaaatggtcattaatgtatatgataggccatttcattttggctgcgtgttcttttaatgccagaagatgctcggtgatatttctggtctttttggaaagaacgtcacccatatcgaattgaaaatcattaatgatgtcgactataatgagagctgaattggacaatgcgattgtctccttttagattttatattcctttaactataagttagcctattcagtttggcgaaaaacattgaaagagtgcatgcggatgacacaagacgagttttatatgaaagaagcggtcaatgaagcgagaaaagccgaagaaaaaggcgaagtgccgattggtgctgtactcgttctggatggggaaattatcgcccgcgcccataatctgagggaaaccgagcaaaggtcggttgcccacgcggagatgctcgtcattgaagaggcatgccggaagctggggacctggcggctggagagagctgttctttacgttacccttgagccatgtccgatgtgtgccggagcggccgttctttccagaatcgacaaagtggtgttcggagcgtctgatccgaaaggcggctgtgcagggactttgatgaatctcctgcaggaggagagattcaatcatcaggctgaagtcgtgagcggcgtaatggaagaagaatgtggcaggatgctgagcgattttttcagaaagctccgcgcgaaaaagaaagcagaaaagcaaagcgagctgtgatgacggaaatttgcaatttaggatgaaacaagttatactaatgagtgcgtcacatcaagacgcagcttaaataatttgatatttattttgccgtgctaagcggggaggtagcggtgccctgtactcgcaatccgctcgagcgaggccgaatccctttctcgaggttcgtttactttaaggtctgccttaagcaagtggtgttgacgcttgggtcctgcgcaatgggaatccatgaaccatgtcaggtccggaaggaagcagcattaagtggaaccttccatgtgccgcagggttgcctgggctgagctaactgcttaagtaacgcttagggtagcgaatcgacagaaggtgcacggtaaatcaatcatcaaattaagaactcatctatttgaatatagatgagtttttttcttaagaagagcttttggatttgaaagccgcatcatgtataatggaaatgatgaaaacaagaggagggcgtgtttgtgagttaccaggctttatatagagtgttcaggccgcagttgtttgaagatgtagtcggtcaggagcacatcacgaaaacgttgcaaaatgcccttttacaaaagaaattttcgcacgcttatctgttttccggaccgaggggaacgggaaaaacaagcgccgcaaaactgtttgccaaagctgtcaactgtgagcgcgctccggtcagtgaaccgtgtaacgaatgctccgcgtgcaaaggcattacaaacggttcgatttcagatgtgatcgaaattgacgccgcttctaacaacggtgtagatgaaatacgcgacatccgcgacaaggtgaaatttgccccgtctgccgtcacgtataaagtatatatcatagatgaagtacatatgctttctatcggcgcattcaacgcccttctaaaaacgcttgaagagccgccggagcattgtatctttattctcgcaacaacagagcctcataaaattcctttaacgattatttctagatgtcagcgatttgattttaagaggattacctcgcaggcaattgtcggacgaatgaaaaaaatcgtcgaagctgaacagttcaaggtgcaggacggagccttagacatcatcgccagtgccgcggacggcggcatgagggatgcgttgagcctgctcgatcaggccgtatcattcagcggagaagagctgacggtggatgatgcgctgctgataacaggcgccgtttcacagcactatattggaaagctcgcctcaacccttcacgaaaaaaatgtttccggtgctttggaaacattgaacgaactccttcagcaggggaaagatccggcaaaattaatcgaggatatgattttctacttcagggatatgcttctttatcaaacggcgcccgatttagaaggcgttcttgaaaaggtgaaggtggacgaagagttccaaaccctatcccggcaaattcccgcatcagacctttacgaaatgatcgatatattaaataaaagccatcaggaaatgaaatggacgaatcatccgcgtatcttctttgaagttgcggttgtgaagctctgccagggaccaaaagcaggggcatccgcggccgcccagccggaagtggacaatctcgtcaacaaggttcggcagcttgaacaggagattgagaggcttaaaacacaaggtgtgcaggtctcttctgctcccgcccaggctaaagaagcgtcccgtccgcaaaaaagcataaaaagcgcgtataaagcgcctgtcggccgcattcatgaaatattaaaggatgccacaagaccggatctcgaaaaattaaagggctgttggggacaattgcttgcccagctgaaacagcagaataaagtatcacatgcggcccttttaaatgacagcgaaccggtggctgcatcttcaaaagcatttgtcctcgcattcaaatacgaaattcactgtaaaatggtagctgaagacaacaacggagtcaggacaaatctggaacaaattttggacggaatgctcggcggaaggatagatatagttggcgttcccgaagcccaatggggtaaaataagagaagaatttttgcaggatcaccagccggaagattctgaagcaaacgaaccgaaagaagaagatccgctcgtagcagaagctaaaaaactgttcggagcggaactgattgaaattaaagaataaaaacatgaaagagagtggatttgagtatgcgcggtggaatgggtaacatgcagaaaatgatgaagcaaatgcaaaaaaatgcaaaaggatatgcaaaaggcacaggtggagctggcagaaaaagtactcgaaggtactgcaggcggtggaatggtgaccgttaaggtgaacggccaaaaagaagtcatcgacgtcatcatcaaagaggaagtcgtagaccctgaagatgttgaaatgcttcaagatcttgttcttgcagcgacaaacgatgctttgaaaaaagttgacgaagtaacaaatgaaacgatgggtaagtttacaaaaggaatgaacatgccgggtttattctaggaggaaaataagaatgcagtatcctgaaccaatatcaaagctgattgacagctttatgaaattgccaggaatcggacccaagacggcggtccgtctggctttttttgttcttagtatgaaagaagacgtcgtgttagattttgcaaaagcattggtaaacgcaaagcgcaatttgacatattgctcggtctgcggacatataacagatcaagatccttgctatatttgtgaagatacgagaagagacaaatcggtcatatgtgttgttcaggatcccaaagatgtcattgctatggagaaaatgaaggagtacaacggactgtaccatgttttgcatggagcgatttctccgatggacggcatcggtccggaagatattaaaatacccgaattgctgaagcggttgcaggatgatcaggtgactgaagtcattctcgcgacaaacccgaatatagaaggagaagcaacggccatgtacatttcaaggcttttaaagccgtctggtatcaagctgtcacgaattgcccatggacttccggtcggaggcgatttggagtatgcagatgaagtcactctttctaaagcgcttgaaggcagacgtgaaatgtagagggaggagattgcgttaccatgggttttcttcggaaaaagaagcttagaaaagaatttgataacaagctggttgaacagctgatccatcaaaaggaagaatggaacaggcaaaagcggctgattgaaaacagcctagagccttccccagaagttctttacgaattaaaggttgccgaggcaaagtactttttttatttgcgggaagcaaaaaaaagaaatttaaggatcggcagctggaagtagcaggtctatttgcatgattcccatcatatgcttgtacaagaacgagcgaggagtgagggaattcatgggatctgttatctttatcggggcaattgtagctttggttgccctgttgtttttttcaaaagcatcatttaagcctttgcgattaatcggaagaatagcggttagatttgtagtcggcgctttgtttttgttctgtgtgaatctgtttggcgagagcgtgggcattcacgtgccgattaatattgtaacaaccggagtgagcggattattgggggttcccggtgtagcagctcttattgtcattaaacaatttatcgcaatataattttttgttgacaaatatatttaaaggtgttaaattaatattcgtcgctaatgacgaataattttttgaaaaaagttgttgacgacatcacgattaaatgttaagatattatagtcgctttgagagcggcaacgaagttctttgaaaactaaacaagacaaaacgtacctgttaattcatttttataaatcgcacatttgagtgtgcgtagtcaggggcctgcacgatgcaggtcatgcagatgttgtcacaggatgtgacgaacttaatctgcgctccattatttcatggagagtttgatcctggctcaggacgaacgctggcggcgtgcctaatacatgcaagtcgagcggaccgacgggagcttgctcccttaggtcagcggcggacgggtgagtaacacgtgggtaacctgcctgtaagactgggataactccgggaaaccggggctaataccggatgcttgattgaaccgcatggttcaatcataaaaggtggcttttagctaccacttacagatggacccgcggcgcattagctagttggtgaggtaacggctcaccaaggcgacgatgcgtagccgacctgagagggtgatcggccacactgggactgagacacggcccagactcctacgggaggcagcagtagggaatcttccgcaatggacgaaagtctgacggagcaacgccgcgtgagtgatgaaggttttcggatcgtaaaactctgttgttagggaagaacaagtaccgttcgaatagggcggcaccttgacggtacctaaccagaaagccacggctaactacgtgccagcagccgcggtaatacgtaggtggcaagcgttgtccggaattattgggcgtaaagcgcgcgcaggcggtttcttaagtctgatgtgaaagcccccggctcaaccggggagggtcattggaaactggggaacttgagtgcagaagaggagagtggaattccacgtgtagcggtgaaatgcgtagagatgtggaggaacaccagtggcgaaggcgactctctggtctgtaactgacgctgaggcgcgaaagcgtggggagcgaacaggattagataccctggtagtccacgccgtaaacgatgagtgctaagtgttagagggtttccgccctttagtgctgcagcaaacgcattaagcactccgcctggggagtacggtcgcaagactgaaactcaaaggaattgacgggggcccgcacaagcggtggagcatgtggtttaattcgaagcaacgcgaagaaccttaccaggtcttgacatcctctgacaaccctagagatagggcttccccttcgggggcagagtgacaggtggtgcatggttgtcgtcagctcgtgtcgtgagatgttgggttaagtcccgcaacgagcgcaacccttgatcttagttgccagcattcagttgggcactctaaggtgactgccggtgacaaaccggaggaaggtggggatgacgtcaaatcatcatgccccttatgacctgggctacacacgtgctacaatgggcagaacaaagggcagcgaagccgcgaggctaagccaatcccacaaatctgttctcagttcggatcgcagtctgcaactcgactgcgtgaagctggaatcgctagtaatcgcggatcagcatgccgcggtgaatacgttcccgggccttgtacacaccgcccgtcacaccacgagagtttgtaacacccgaagtcggtgaggtaaccttttggagccagccgccgaaggtgggacagatgattggggtgaagtcgtaacaaggtagccgtatcggaaggtgcggctggatcacctcctttctaaggatattatacggaatataagaccttgcggtcttatagacaggtgcgtttggatcttgtttagttttgaaggaacttccttcatatgaatcaaaagatgggcctgtagctcagctggttagagcgcacgcctgataagcgtgaggtcggtggttcgagtccactcaggcccaccatctttatacacggggccttagctcagctgggagagcgcctgctttgcacgcaggaggtcagcggttcgatcccgctaggctccaccaacgtgttctttgaaaactagataacgaaagtagacattcacattcaattgtaatgcaagatatcacgtagtgattctttttaacggttaagttagaaagggcgcacggtggatgccttggcactaggagccgatgaaggacgggacgaacaccgatatgcttcggggagctgtaagcaagctttgatccggagatttccgaatggggaaacccactgctcgtaatggagcagtatccatatctgaattcataggatatgagaaggcagacccggggaactgaaacatctaagtacccggaggaagagaaagcaaatgcgattccctgagtagcggcgagcgaaacgggaacagcccaaaccaagaggcttgcctcttggggttgtaggacactctgtacggagttacaaaagaacgaggtagatgaagaggtctggaaaggcccgccataggaggtaacagccctgtagtcaaaacttcgttctctcctgagtggatcctgagtacggcggaacacgtgaaattccgtcggaatccgggaggaccatctcccaaggctaaatactccctagtgaccgatagtgaaccagtaccgtgagggaaaggtgaaaagcaccccggaaggggagtgaaagagatcctgaaaccgtgtgcctacaagtagtcagagcccgttaacgggtgatggcgtgccttttgtagaatgaaccggcgagttacgatcccgtgcaaggttaagtttgaaaagacggagccgcagcgaaagcgagtctgaatagggcgcatgagtacgtggtcgtagacccgaaaccaggtgatctacccatgtccagggtgaagttcaggtaacactgaatggaggcccgaacccacgcacgttgaaaagtgcggggatgaggtgtgggtaggggtgaaatgccaatcgaacctggagatagctggttctctccgaaatagctttagggctagcctcaaggtaagagtcttggaggtagagcactgattggactaggggcccctaccgggttaccgaattcagtcaaactccgaatgccaaagacttatccttgggagtcagactgcgagtgataagatccgtagtcgaaagggaaacagccccagaccgccagctaaggtcccaaagtatacgttaagtggaaaaggatgtggagttgcttagacaaccagaatgttggcttagaagcagccaccatttaaagagtgcgtaatagctcactggtcgagtgactctgcgccgaaaatgtaccggggctaaacgtatcaccgaagctgcggactgttcttgcgaacagtggtaggagagcgttctaagggctgtgaagcgagaccggaaggactcgtggagcgcttagaagtgagaatgccggtatgagtagcgaaagaggggtgagaatcccctccaccgaatgcctaaggtttcctgaggaaggctcgtccgctcagggttagtcgggacctaagccgaggccgaaaggcgtaggcgatggacaacaggttgatattcctgtaccacctcctcaccatttgagcaatggggggacgcaggaggatagggtaagcgcggtattggatatccgcgtccaagcagttaggctgggaaataggcaaatccgtttcccgtaaggctgagctgtgatggcgagcgaaatatagtagcgaagttcctgattccacactgccaagaaaagcctctagcgaggtgagaggtgcccgtaccgcaaaccgacacaggtaggcgaggagagaatcctaaggtgatcgagagaactctcgttaaggaactcggcaaaatgaccccgtaacttcgggagaaggggtgctctgttagggtgcaagcccgagagagccgcagtgaataggcccaggcgactgtttagcaaaaacacaggtctctgcgaagccgtaaggcgaagtataggggctgacgcctgcccggtgctggaaggttaagaggagcgcttagcgtaagcgaaggtgcgaattgaagccccagtaaacggcggccgtaactataacggtcctaaggtagcgaaattccttgtcgggtaagttccgacccgcacgaaaggcgcaacgatctgggcactgtctcaacgagagactcggtgaaattatagtacctgtgaagatgcaggttacccgcgacaggacggaaagaccccgtggagctttactgcagcctgatattgaatgttggtacagcttgtacaggataggtaggagccttggaaaccggagcgccagcttcggtggaggcatcggtgggatactaccctggctgtattgaccttctaacccgctgcccttatcgggcagggagacagtgtcaggtgggcagtttgactggggcggtcgcctcctaaaaggtaacggaggcgcccaaaggttccctcagaatggttggaaatcattcgcagagtgtaaaggcacaagggagcttggctgcgagacctacaagtcgagcagggacgaaagtcgggcttagtgatccggtggttccgcatggaagggccatcgctcaacggataaaagctaccccggggataacaggcttatctcccccaagagtccacatcgacggggaggtttggcacctcgatgtcggctcatcgcatcctggggctgtagtcggtcccaagggttgggctgttcgcccattaaagcggtacgcgagctgggttcagaacgtcgtgagacagttcggtccctatccgtcgcgggcgcaggaaatttgagaggagctgtccttagtacgagaggaccgggatggacgcaccgctggtgtaccagttgttctgccaagggcatcgctgggtagctatgtgcggacgggataagtgctgaaagcatctaagcatgaagcccccctcaagatgagatttcccattcctataaggaagtaagatccctgaaagatgatcaggttgataggtctgaggtggaagtgtggcgacacatggagctgacagatactaatcgatcgaggacttaacctaaatatttgtgaatcgtctgtccgttatctagttttgagagaatgctctcagaaagccaaaggcaaggaaactcggctaaaggccctcacatcctgtgaggaacgcccagtaccttcgtcctgaaaggcatagtttggtggcgatagcgaagaggtcacacccgttcccattgccgaacacggaagttaagacttcttcagcgcccgatggtagttgggggcttccccctgtgagagtaggacgccgccaagcgcttagaggaccagcttatataagctggtcttttttatttggaacctcattgatacaaacacctaacacttcccggctacatatactaatctaaccttcaaaaactttcttaattttgcatacaaatattgttctttgggaatactgaaacccatggaggtggaatggatgagtaagtctaatcatggggaaacgtgtatcatttgcgaggaaaataaaaccgaaggaattcatctttatacgaaatttttatgttcggattgtgagaaaaagattgtatctacatcaacatcagaccccgaatactctgattatgtcaaaaaattaaagagtctccgtacgccgccattatattcttagaccgtttcaggtcttttttttaagcctttaagtcggtattgaggaaggttataataaaagtggtgaagacacggttaaagtgtcttttttgctatacaccatgaactgaaactttgcttagccgatatccgtattagagagtagtataatgaaacgaccgatttatcataaaaaattaggagtagtggtgtaatgaaaccgattcttcattttatgattcgtgcaactgctgcaagtgcattgtccgtgctcctttggtttacaagcttcttcgcgtttaaccagacttttctgctgtcctccgcttacgcagccggagcctggattgccgtttatcttggcgggaaatggtacggaacctatttatttttaaaagaaaaccagcttacaaggcgggaatatgcctatataaaacagaatttgcgggaagctaagctgaaaattgcccggttaagaaaagccttatttgcagtcaaaaacattcaaactattaaacagaatctagaaattcttcggatcgtcagaaaaatttacagcatcacaaagaacgaaccaaagcgtttttatcaggttgaacgcttttattatcaaagccttgattcaattgttgaactgacggaaaagcatgcgtttttggcgtcacagccaaagcgcaatgcgaatcttgaagtttctttaagcgaaacgcgtatgatgatcgataagctcgccaagcaattggaagacgacctttatgacttgctgaaaacagacattgaccacttggagtttgaactggacgtcgcgaagcattcaatgaaaaaagctgatggaggaaagctgaaatgagcgaatataaaccatcgttacacaaaactggcgcacagcttgaatttgatgatttgctttccgatccttttggacaaggagaagcgcctgtttccggcgtggaggaaaaactccgcgggcagcaagtgaatctggttgatacgttatctgaagaaaaacgccggcaggcatttcaactggccgaacagattgacccgaaaaaccataacagcattactctgtatggaacgcaagctcaatccaaactcttgaacttctcacatgagatgctcgagcacgtccaaaagaaagatgtcggtgaaattgggcaggttttaagcgacctcatgaaaaagcttgaacaggtcagccccgatgaattgaaaactgaaaaaaggaacttcttttcccgtttgtttggaagagtatcccattctgttcaagaagtgttatcaaggtatcaaaaaaccggcgctcaaatagatagaatcagcgtaaaacttgagcattccaaaagcgcgctgatcaatgataataagatgctcgaacggctttatgaaaaaaataaagaatattatgaggcactgaatgtctatattgcagccggtcagctgaagctggaagaattaaatcataaaaccattcccgaattaaaagagaaatcgaaaactgaacatcaccatatggccgttcaggaagtaaacgatatgattcagtttgaagaccggctggaaaagcgggtttatgatctaacgttaagcaggcaaattacgctgcagagcgccccgcaaatccgtttgatccagcacacaaatcaagtgctggcggaaaagattcaatcttcgattatgacagcaatccctctttggaaaaaccaggttgctattgcgctcaccctgttgaggcagcgccgagcagtagaggctcaaaaacaggtgtcggccacaacaaacgaactgctcttgaaaaatgccgagatgctgaaggccaatacgatcgaaacggcaaaggaaaatgaacgaggctttattgatattgaaacattgaaacaagtgcaggacaatctgatcggtacacttgaggagacgcttaaaattcaagaggaaggccgttcaaagcggctgcaggcagaagaagaaataagggcaatggaagatggtctcaaggctaagctgctggacatgaaagaaaaccaaaaccgtagatcataagcaagattaacatttaccaaatggtccgccctttatgtaatccgccttgaagggtataataaatgcagaatgtcatatcggcatccggcagcgcctggatgccgaagaaaatagagaagatgactaaaggatcggtttatatgaagacacctttatatacagcattggtgaaccatgctgaaggacatcattattcttttcacgttccgggacatcacaatggagatgtcttttttgatgaagcaaaaactttttttgaaacgattctcaaagtggatctaactgaactgacaggactggatgatttacatgagccatctggcgtcatcaaggaagcacaggatttagtttcgcggctttacggagcggaagaaagcttttttctcgtcaatggttcgaccgttgggaatctggctatgatcctggctgtttgtcagccgggtgatacgatactcgttcagcgtaactgccataagtctgtatttcatgcgattgaactttcaggcgcccatccggtttttttgacaccggaaattgatgaggcgatggctgttcccacacatatactgtacgaaacagttgaagatgcaatttcacaatatccgcacgcaaaagggatcgtgttgacatatccaaattactacggccatgcagttgatctgaagccgatcatagaaaaggcccaccaacacgatatttccgttttagtcgacgaggctcacggcgcccattttgtgctgggccatccatttccccagtcgtcgttgaaagcgggcgctgatgccgtcgtccagtccgcgcataaaacgctcccggcgatgacgatggggtcctatctgcatcttaacagcggcaggatcaacagggacagactggcatactatctgtccgtgcttcaaagcagcagtccttcctacccaattatggcatctttggatatagctagggcatacgccgaagatatcttgaaaacaaatcgaacagccgatattgagaaagagctcatcaatatgagagaagtcttttctcaaataaacggagctgatattgtcgagccggctgatgcccgtatccggcaagatccgcttaagctgtgtatcagatcagcgtacggccactccggttttgaactgaaatccatatttgaagcaaacggcatccatcctgaattggcagatgaaaggcaagtcctgttgatcctgccgcttgaaggaaaaaatatgcccgcgccggaactgatcagcacaatcagtaaagacatgaaagatacagcagttcgaaatgatcttcctgccggaatcggaatcccttctgaaaaagtcacggctttgccttaccggaaaagcaagttgtctgccttcaaaaaagaatcggtgccttttaccgaagcagcgggcagaataagcgccgaatcggtcacaccttatcctccgggcattccgttgatcatggcgggtgagagaataacaaaagagacgatcagccggctgacgcggctcgtcgatctgaatgtacacattcagggcagcaatcagctcaaacaaaagcaattaactgtatatatagaagaggagaaatcatgaacggtttatttattacttttgaagggcctgaaggtgcggggaaaacgacaatccttcaggctgcggcagaccaattgacgaaaaacggccattctgttcttgcgacaagggagccgggcggcattgaaatatcagaacgaattcgcgaggttattttaaatccaagccatacagcaatggatcccaaaacagaggccttgttgtatgcggccgcaagaaggcagcacctagtcgaaaaagtaaaaccggcgcttgaagaagggaaaatcgtcttatgcgaccggttcatcgacagctcgcttgcttatcaggggtatgccaggggactcggcattgatgaagtattttctgttaatcaattcgcgatcggcagcctgatgccgaatgtgacgatttatttcgacattgacccggaagagggaatcaaacgaatcgatttaaatgatgcaagagagaaaaaccggcttgatttggaaaaactccactttcatcagcttgttcaaaaaggctacgaagaagttatgaaccggttccccggacgatttcggattgtggatgccagccaaagtgttgaacttgtgttaaaaagggtaaataacatcattgaggaagcattaaaagaaaatcagttgtgaccagtttaccattcattgttataatggtaacaagagtatccttaaagtgtttccatccaaaagggggcttttcatatgaagttaattatcgctgttgttcaagaccaagacagcaaccggcttttaaaggctttgaccgatcacaattttcgcgtgaccaaactggcgtcgaccggcggctttctgaaatcgggaaacacaaccttcatgttgggtgtagatgatattcgagtagacaaagctttaagcttgataaaagaaaacggaagcaagcgggatcagctgattgcccctgtttctccaatgggcggaaatgctgattcatatgttccttatcctgttgaggttgaagtgggcggagcaaccgtttttgtactgccgatcgagcaattccatcaattttaagggttgaggatatgaaaataagtcaagaactgcgtacaatgatagagaaacagcagactccgcctgcaagaggagaaaatgtttctgcttcatttaaagagaagatgaatatacaaagcggcaagcttcgagttgaacagctgacaatgcttttaacagatattgaagcgttcggaaaacgcctctcaaaatcgagaaacttcaaagatttggccaggttcaaaggcttgatcaaacgatttgtaaaagagaccgttgaaaacggtctgacggtggagaattcaagaagcttcgatctgtacggaaacagccggacattaagcattgtgaaagaactggacgaaaagcttgtgcaattaactgaggatcttatggatcaagaaaaatcctctatcgaacttttggaacgcattggcgaaataaagggtttactgataaacctttacacatagagagtgatggtatggctacaacctggacagaaatgcagaagcttcagccacgggttatgaagcttttgcaaaatagtatagaaagaaatcggcttgcccacgcctatttatttgaagggcgcaaagggacgggcaaattagacgcggcaacccttctggcaaaaagctttttttgccttgaagatggagcagagccatgtgagtcatgcaggaactgccagcggattgaatctggaaaccatccggacgtacacgtcgtccatccggacggcctttccattaaaaagggacaaatccaggcgcttcaggaagagttttctaagaccggtttggaatcgcataaaaagctgtatattatttcccatgcggatcaaatgacggtcaatgcggcgaacagccttctaaagtttttagaggaaccgagcagcgatacaatcgctgttcttttaacggaacagccgcaaaaattgctcgatacgatcatatcgagatgccaggttttatcctttcagtcgctgcagcccgaatcgattgaaaaggaactggttaaacaagaggtctcaccgaatattgcagcccttttgtcgaatatgaccaacaatttatcggaagcgctcgaattgagtcgaaatgatcagtttgcagagtcgcgagcgaaagtgataaaattgtatgaagtcttacaccagcgaaaaggacatgcttttttctatattcaagatcagtggatgccctttttcaaggagaaagaccaccaagaaatgggtcttgatatgcttttatttatatatcgcgacgtgttgtccattcagttgggacatgaagataaaatactatttcaggacttattccaatcattaaaacagcatgcgctgcaaacaacacaacaaagagtgacaaaccagatacttgctgttttagaagcaaaaaaacggctttattccaatgtgaatgctcaaggattaatggagcacttggttttaatgctgcaggagggataagcttgtacaacgttattggtgtccgctttaaaaaagcgggcaaaatatattatttcgatccgaacggatttcagatagataaagacagctgtgtgatcgtcgaaacggttcgcggtgttgaatacgggcaggttgtcattgccaacaagaaagtagacgagaacgatgtcgtgctgcctttaagaaaagtgatcagagttgcggatgaacgcgaccgcctgatcgttgaggagaatcaagaagctgcgctgtccgcctttgatgtctgccagaaaaaggttaacgagcacggccttgagatgaaactggtcgatgtggaattcacttttgaccgcaacaaagtcattttttattttacggctgatggaagagtcgattttagagaactcgtcaaagatttggcatcgatctttaaaacgagaatcgagctgagacaaatcggcgtcagagatgaagcgaagatgctcggcggtatcggaccgtgtggaagaatgctttgctgttccacgtttttaggtgattttgagcccgtttctattaaaatggcaaaggatcaaaatctgtcgctgaatccgacgaagatttccggactatgcggacggctgatgtgctgtctaaagtatgaaaacgatgaatacgaaacagccaaagaacagcttccggatatcggggaagtgatcgccacgtccagcggcccggcaaaagtcgtcgggttgaatattctcgaacgcattctccaggttgaactgacagactgcgacaaagttgttgaatatacgtgggatgagctgttgcaagaaggtgtcgtatctgcacaaaccacagattaacgaggtgtgaaaccttggataaaaaagaattgtttgatacagtgataagtttagaagaacaaatcgggtccctttaccgccagcttggagatctcaagcagcatatcggggaaatgattgaagaaaacaatcatttacagcttgaaaacgagcatttgcgcaagaggctggaagagacggatcaaaggctaaaaagcgtaaaatccgatgaaaaagagataaaagcagaaaagacagggcatgctgatattggagagggccatgataatttggctcgcctgtatcaggagggcttccatatttgcaacatccattacggaagtgttcgcaaagaaggagactgtctgttctgcctctcgtttttaaataaaaaataagaaaggcttccggcggaacggaagcctttttaacggtacaatgtgtttaggaaagggaaaagacatgattcaattaaaagatgatgaacgactggattatttactggcggaagatatgaaaatcgtgcaaagcccgacagtttttgcattttccttagatgctgttctgctgtcgaaatttgcttacgttccgatacaaaaaggaaacatcattgatttgtgcacagggaacgggattgttccgctgcttctcagcacccgcacaaaagccgccatcaccggggtggaaattcaggaaaggctgtatgacatggccctccgcagcgtggaatacaacaacctgcaaaaacagattcatctcatcagggacgacttgaaaaatatgccgcaggtgctcggatacaataaggccgatgtcgtcacatgcaatcctccttatttcaagacgccgaaaaaaacggagcaaaacctaaatgaacatttggccattgccagacatgaaatctactgcacgcttgaagatgttattcgcgtcagcagcaagctattaaagcagggcggcaaactcgctctcgttcaccggccggggaggctgctcgaaatctttgaattgatgaaggcctttcaaatcgagccgaagcgggtccaatttgtttacccgaaaaaaagcaaagaagccaacaccattttagtagaaggaataaaagacggccgacctgacctgaaaattttgcctcctttgtttgtgtatgatgaacaagatcaatatacacatgaaataaggaagattttatatggagacgaatagccattacttttacgtgctttcgtgccgggacggcagcttttacgcaggctatacaaacaatatcgaaaagcgcctgaaaacgcataatgacgggaagggcgccaagtatacgagggcaaggctgccggttaaactccattatgcagagtgcttttcaacgaaacgagaagcgatgcaggccgagtactatttcaaaaaattatcgagaaaaaacaaagaacgttatatagaagaaaaaagacgggagggtgttgattatcaaccggcaaaagagttttgaccaaaaatcagacatgggtatgttatatctcgtaccgactcccatcggcaatttagaggatatgacatttcgggcggtttctgtgttaaaagaggcggacattatagcggcggaggatacgaggcagacgaagaaattgtgccatgtgtatgaaattgagacacagcttgtcagctaccatgaacacaataaagaaagcagcggacataaaattttggaatggctgaaagaaggaaaaaacgtcgcattggtcagtgacgccggaatgccgacaatatctgaccccggggctgaaatcgtccgcgattttatcgaaatgggcggctatgtcgtacccctgcccggtgcaaatgcggctttgaccgcactgattgcctcaggcattgcgccgcagccgtttttctttttcggctttttggaccgcagcaaacgggaaaggaaaaaacagctcgaggctttgaagaacagacaggaaacgatgattttttacgagtcgccgcatcggctgaaagaaaccttggcggccatcagagaggtattcggcaatcggcaaatcgcattgacaagggaactcacgaaaaaattcgaagaatttatcagaggttcgatcgaagaagcactcacatggtctgaacaggaacaggtgcgcggagagttttgccttgtgatcgaaggaagccgtgaagaaacgattgaagaggcggtctggtgggagcatctttcagaaaaagaacatgtcgagcattatatcagcgaaggatatccttcaaaagaagccattaaaaaaaccgcggttgaccgcggcgttccgaaacggaaaatttatgacgcttaccatattcaaaactaaaaaaccgcccttgcttcggcaagagcggtttttgtataatcaaaataattatttttgagattgaagttgtgcttgaatttcgttaatgatttgctcagcgccttcagggctaagaaccaatttaccgcctgcaagtttaaggttgtcatcagaaacctcacctgtaacttggcaagtcatgtttggtttatattttttcaagatgattttttcgtcatctacatagatttcaagagcgtctttttctgcgattccaagcgtacggcgaagttcgattggaatcaccacgcgtcctagttcatcaactttacgtacaatacctgtagatttcatattcattctcctcccgaaagattgttatttttataggtgtttattatcttcgtcattattcgacaaaatccttacagtcctagcataacaaggtttccaataaacgtcaatcattttcttttctattgtttgtaaaaattagatcatatagtcaaaagaccttggaagaactgatgtaacaagggaattgaagatgataaaacagtatgatcaatacaaaaaaaaagcccttaaatcaagactttcgaactaaggtttttcctcatatcgattatatacgacattattcgacaatgaaagcatttttttgtcgaagtataatatttctttctgttaaaaaatttgtaatcgaccgtattcatgatggatcgacaatgtatattttcttgaacttgaaggctaagatggtatcatataaagagggattatatattgagtatatactgaatgaatacacatgccgctctcgtcctttgggcgggagttttttgacattttaattgggaggttccatcatgccgcaagaaaaaaatacgttttacatcactacacccatttattacccaagtgggaagctacatattggacatgcctacacgaccgttgcaggtgatgcgatggctcggtataaaagactgagaggctttgatgtcagatacttaactggtacagatgagcacggacaaaaaattcagcaaacggcggagaaggaaaacatcactccgcaggaattggtcgatcgtgcggcagaagacattcagcagctttggaaaaagctcgacatatccaatgacgacttcattcggacgacagaggaacgtcataaaaaagtgatcgaaaaggtatttcagaagctgcttgacaatggtgacatatatcttgatgaatatgagggctggtacagcatccctgacgaaacgttttacaccgaaacccagctcgttgatgtcgagcgaaacgaaaaaggcgaagttatcggagggaaaagtcctgacagcggccaccccgttgagctaatcaaagaggaatcttacttcttccgcatgggaaaatacgcggatcggcttctcgctttctatgaagaaaatcctgaattcatccagcctgaatcccggaaaaatgaaatgatcaacaactttatcaaaccgggtcttgaagatttggctgtttcccggacgacgttcgactgggggataaaagtgcccggcaatccgaagcatgtcatctatgtttggatagatgcgctgtttaattacattacggcacttggctttaatacggaaaacgatgaaaattatcaaaaatattggccggcagacgttcatcttgtcggtaaggagatcgtccgcttccataccatttactggccgattatgctgatggcattggaccttccgctgccgaaaaaggtttttgcccacgggtggctgctgatgaaagatggaaaaatgtctaaatcaaaaggcaatgtggttgacccggtcacattaatcgacagatacggactagatgcattgcgttattatcttctccgcgaagtgccgttcggttctgacggcgtatttacaccggaaggatttgtcgagcggattaactatgatttagcgaatgatttaggcaacctgctgaacagaacggtcgccatggtcaacaaatactttgacggccggattcagtcgtatgaaggcccggttaccgcttttgacgaaccgttgtcatcattctcgcaaaagacaattgaagcgtacgagcaggcgatcgaaaatatggagttttccgttgcgctttcatcattgtggcagtttgtcagcagaacgaataaatacatcgacgagacagccccttgggtactggcaaaagataaggataaagaaaaagagcttcaatcggtcatgtaccatttggcggagtcattgcgcatcactgctgtattgctgcagccgttcttaacgcagacgcctgaaaagattttcgcacagcttggcgttacggatgcgtcactgaaaacctgggacagcattcaaagcttcggccagctgaaatctgtgacagttcaaaaaggagaaccattgttcccgcgtcttgaggcggaagacgaagtcgcttatatcaaatcaaaaatgcagggaacggctccaaaagaagaaccaaagcaagaggaaaaagcacctgaacggcttccggaaatcacgatagacgattttatgagcacagagctcagagtggctgaagtcattcatgctgaacccgtcaaaaaagcggatcgtctgttaaaactccagcttgatttaggctttgaaaaacgccaagtcgtttcaggaattgccaagcactacaaacctgaagagcttgtcggccggaaagtcatttgtgtaacaaatttaaaaccggtcaaactaagaggagaactttctcaaggcatgatattggctggagaggacaatggcgttctctcgcttgcggaggtagacagttcattagcaaacggaacgcgaatcaaataaatgcaggcaaagggtgttccacgtgtaacatttcgtcgaacaccttttgttttttcgacaatttcttaaaaaggtggcattttcatgttatttgatacacatgctcatttaaacgccgagcaatttaacgaggatttggaagaagtcattgctcgggcaaaggaagaaaaagtggagcacattgtcgtggtaggattcgatcgtccgacgatcaagcgtgcgatggaattgattgaagaatacgattttatttatgcagccatcgggtggcatccggttgacgcaattgatatgaccgatgaagatttggcttggatcaaagacctgtccgcccatgagaaagttgtggcgatcggagaaatgggacttgattatcattgggataagtcgccgaaggacgttcaaaaagaggtgttcagaaaacagatcgctttggcaaaagaagtcggcttgccaatcgtgattcacaaccgtgatgcaacggaggatgtcgtttctattttgcgggaagaaggggccgaggaagtcggcgggatcatgcactgttatacaggaagcgctgaaattgcacaagagtgcatcgatatgaatttctacctatctttcggcggacccgtcacatttaaaaacgccaaaaaaccgaagcaagtggtcaaacaaataccaaatgaccggcttttaattgagacggactgcccgtatttaacgccgcatccatacagaggaaagcggaatgaacctagctatgtcaaacttgtcgccgaacagattgccgaattaaaaggaatgacttatgaagaaatagcggccgtcaccacagaaaatgcaaaaaaacttttcggcatcagctgacacgatttgatatcgagccttgttcaagcttgtctcttcgggggatggttctaaaaagttctacatgtctgtttacgctcataggatatctttgtcgacaagtctttctttcttttatgaggtggttttcccataataaaagagatggcgggcttgcggagaaaatagagaggagggttgacaggcttgtagatactctatataatctccccgaggagaaggaggcgtttttcatcatacaaaaaatgaaaaagctgttttccgtaaagcttagcaaaagcagatggattctgattgctgctggactgcttgtcgcagggagcggaactgcttacggagcacatgagctcgctaaacagcaagtcaccatttcgataaacgggaaaaagcaggatgttcgcacgaatgctaaaaccgtaggtgaactgctgaaaagcttagacatcgagacgaggaaagaagatcacatctctcccgctgaagatacaaaattaacggcgaacatgaatgttgaatatgttgccgcaaaacctgttcatttcacggtcgacggacaggaaaaggaaatctggacaacagcgggtacagtcggcaaacttctgaaagacttaaatttagagttggcggaacacgatcaaattgacccctcagttgataaagaaataacgaaagatatgaagctgactttgcaaagggcttttaaagtaaccgtaaaggatgccggtaaagataaagacctatggacgacttcgactacggtcgctgactttttaaaacatcataagatcagcataaaaggcgatgatgaagttaagcctgcgcttgataaaaagctgacgaaagatcaggcgattcacattactcgtatcaaaaaagtcaccgatgtagtggaagagaacatcccttttgaagtccggaaaaaagaggacgattcacttgaaaaggggaaagaaaaagttgtacaggacggtaaacatggcaagcttaaaaagcactatgccgttgttatgaaaaacggcaaggaagtttccagagaactgattaaagaggaaacggcagccgaaagcaaagccaaaatcatcgctgtcggtacaaagcaagccgcagtggctaaagtcagcgcgaatgtatcgcgcggaaatcaatcctcaggaaaggaattttatgtatcctctacagcttatacagcaagctgcaacggatgctcaggccacactgcgaccggcgttaatttgaaaaataatcccggcgctaaagtgatcgctgtcgatccgagcgttattccgctgggttccaaagtacatgtagaaggatatggctatgcggttgcggccgatacaggctcagccatcaaaggccgaaaaatcgatgtattctttccgaataagtctacagcttaccgctggggaaacaaaagagttaaaatcaaggtgttgaactaaatatcatttattatgctttttatataagcagagggattttgcgccctctgtttttttggttataatagatccatcttgttttctaataaattagacggttttattacaaaaaggtttcaatcattttaaaaatgtaataaaaggtttttcaacatacggaggaagaaatgaagattaaagaaatcattgttgtcgaaggccgtgatgacaccgctaaaatcaaatcggctgttgatgcagatacgatcgaaacgaacggatctgccataggggaagacgtcatcaaacggattcggctcgcccaggaaacgcgcggggttattattttaaccgatcccgatttcccgggggaaaaaatcagaaaaacgattgcagaaaaggtccccggctgcaagcatgcatttttgcccaagcatttggcaaagcctaaaaataaacgcggaatcggtgtcgaacacgcttcgcttgaagcgatccgcgaatgcttaatgaccgttcaggaggaaatggaagcgacggaacctgagattgaggcccgggatttaatcgaagccggcctgatcggaggcccgctggcaaaacaaaggcgggagcggctcggcgaaatattgaatatcggctatacaaatgggaaacagcttcaaaagcggctgcaaatgtttcagatcaaaaagagtgattatttaagcgcactggatgctgtgctgcgggaggaagaacatgaataaagatatcgccaccccaattaggactaaggaaattctcaataaatacggattttcattcaaaaaaagcctggggcagaacttcttgattgacacgaacatattggacagaattgtcgaccatgccggtgtgacggagcgtacaggcgtgattgaaatcggtccggggatcggggcattgaccgagcagctggcaaagcgtgcgaagaaagtaacggcctttgagatcgaccaacggcttctgccgattttagaagatacgctttctccgtatgataatgtgactgtcattcaccaggatgtcctgaaggccgatgtccgagcggtaatggacgaacagtttcaagactgcgatgaggtgatggttgtcgccaacctcccgtattacgtcacgactccgatcatcatgaagcttttagaagaaaatctgccgctgaaaggaatcgtcgtcatgcttcaaaaagaggtggcggaccgaatggctgcaaaaccttcttcaaaggaatacgggtccctttccatcgcggtgcagttttatacggaggccaaaacggtcatgaatgtaccaaagaccgtatttgtccctcagcctaacgtagattccgcggtcatcaggcttacgctgaggaaagagccggctgtggccgttcaagatgctgcctttttctttcaagtcgtaaaagcaagctttgcacagcgtcgaaaaacgcttttcaacaacctcgtcaacaatctgccgaatggcaaagagaataaatcaaaaattgaaagagcgcttcaggattcacatatcgacggaaaacgacgcggagagtcgcttagcattgaagagttcgccgtcttatctgaccgcttgagagaagtccttctttaatggagggctttttttattgatgccgggctttaagcctgatcaggcttgtcatccgttcaccacttaaagggcaggcacataggctaaagaagcacctttactttttcgttgcttgatgttcatcaggatggggcttagtctatgtgtggagtgaaaagcatgcaatttaaaataggcgatatggtcgtcagaaaatcttatcgaagagatattttatttcgaattataagaattgatcaatcggcaaatggagaacctgtagccgttttgcacggagatgaggtcagattaatcgctgacgcgcatttgggggatcttgagattgtccgcgaggctgagcggcagatgagaaagcgggaagaagaaacgagaatgaaggaatccctcgatcttctccgccaggattacaaactccttcacgataaacatgagtaccgcgccacaaaccaatataacaatcaacagcagtactttcatatgcccggaagagtccttcatttagacggggattcggcttatttgaaaaagtgtctggcgctctacgaaaagatcggggttcctgtatacggcattcattgctatgaaaagaaaatgtcatcagtcatcgaggaactgatcgatgaataccgcccggatcttctcgtcattaccggacacgatgcctattctaagcagaagggcgatattaacaatctggatgcctacaggcattcaaaagattttatcgaaaccgttcaaaaagcgagaagaaaaattccccatcttgatcagctcgtcatttttgccggcgcatgccagtcccattttgaatcactgatcagagccggtgcaaatttcgcaagctctccgtccagagtcaacatccatgcgcttgatccggtctatatagtcgcaaaaatcagcttcactccgtttatggaccgcattaacgtctgggaagtgctcagaaataccttgacgagagaaaaggggctcggaggtattgagacgcggggcgtattgcgtattggaatgccatataaaacaaaagcaaacgattaaacgagcccgccggatggcgggtttttgctatgcacacgaaatgtttttaccttttttttaaaaacatacataatgaaacgaaaaatgaggaaaataagggaaagtcggcgtataatttgtcacaaatattttattgacagaggcttatgaacgttgatataatttaaattttatttgacaaaaatgggcttctggtgtatactgaatatagtgaggtggatgcaatggcgaaaacgttgtccgatattaaaagatcgcttgatggacatttgggaaaaaggctgacgttaaaagcaaacggtggccgccgaaaaacgattgagcgttcgggcattttagctgagacgtacccttctgtttttgtgatacaactagaccaagacgagaattcgtttgaaagagtttcatacagttatgcggatattcttactgagacggttgaattgaggttttccgatgataaaaccagctcagtagccctttaataagcagtggactttatgtttgctgctttttgttttgcctttttttatccaaaatttttcggggaagttctgcacaaatcgagcaaagctaatacatgtcacttgttttatgatgagtcagacggatggtatgatacttgaaaggggctgtttcgcatgggcagacgtcgaagcatcatgtcagaggaattcaaaaatgaattggctaaagatcttggattttacgatacggtaaaaaccgagggctggggcggaattcgggccagagacgccggcaacatggtgaaaagggccatcgaattagccgaacagcatatggctcaaaatcagcaaaatcattaaaacagtgacatacgggggacgcttctgtcctccgtttttttcattgatccgttttcagtgttcagccgctgtaagcgacctgggaatcatggcgaggggcgcattcgcaatctgaaggaatgaccgcatgccaaaggcgaggcatcctgcgcaggcgcatgcatttgtacttgcgaggaatgaccgcatgctaagagcgcggcgtcctgcctcaggcgcatgcatttgtacgtcctgaacttcaaaatatgttacaatgtggatacttatgtttagatggagaagtaggtgaatggattgcgtattttagagaaggcgccggctaaaattaatttgtcgctcgacgttcgccgcaaacgtccagatgggtatcatgaagtagagatggtcatgacgacgattgatttggcggatcgggtcgaattaacagagctggcagaagataaagtaacggtttcttcgcataaccgctttgttcccgacgatcagcgaaaccttgcttatcaggctgcaatgctcatgaaagaacgctacggcattaaaaaaggggtttccatttttattacgaaagtgattcccgttgctgcgggccttgcaggaggaagcagcgatgcggctgccgtcttcagaggattgaaccggctgtgggatttgaagctttcgatgaatgaactggctgagcttggcgctgagatcggatctgatgtctccttttgcgtacatggaggaacggctcttgcaacgggaaggggagagaaaatccgtcatatcgagactccgccgcactgctgggtagtgctggcaaagccgacgatcggcgtatcaactgcagaagtgtacaagcagctgaaagtcgacgagattgaacatccggatgttcaaggtatgattgctgcgattgaagagaagaattttcaaaaaatgtgtgacaagctcggcaatgtactcgaatctgttacattgaacatgcaccccgaagtcgcgatgatcaaaaatcaaatgaagcggttcggcgccgatgctatgctgatgagcgggagcggccccactgtgttcggacttgttcaatacgaatcaaaagtgcaaagaatctataacggattaagagggttttgcgatcaggtttatgcggtgcggatgatcggagaacaaaatgaacttgattaaatccgtatgttaagttatattgtttttaaaaatattcggattttggaggtgagtgcatgaagtttcgtcgaagcggcagattggtggatctgacaaattatttgttgacccatccgcatgtcttagtgccattaaccttcttttcagaacggtatcaatctgctaaatcatccattagtgaagatttaaccatcattaagcagaccttcgagcagcagggaatcggaacgcttcagaccgtgccgggagcagccggcggcgttaaatacattccaaaggtaaaacgcgatgaagcggaggaatttgtaaagtcgctcggtgagtcattgatcgattcggaacggatattgcccggcggatatttgtatttaaccgatattcttggaaagccctctgtattaacgaaggccggcaaaatttttgcttccgctttttcagacagggagatcgatgtcgtgatgacggtggcgacaaaaggcattcctttggcatatgcggtagccagctaccttgatgtgccgacagtggtcgtcagaaaagacaataaggtaaccgaagggtcaacggtcagcatcaactatgtgtccggatcatccaaccgcattcagacgatgtctcttgcaaaacgaagcttgcagacgggctcgcacgttttgatcatagacgactttatgaaagcgggaggaacgatcaacggcatgatcaatcttctcgatgaattcaatgcccatgtagcgggcatcggtgttcttgtggaagctcagggagtcaaggagcggctggtcgatgagtatatgtcccttttgactctttctgaaatcgatatgaaggaaaaaaaggtggaaatacaaaacggaaattttcagcgtttttttgcagaagatgaataggaaatggggagtttgagatgacaaaggttgttcagacaaaagaagcaccggcggcgatcggaccgtattcacaaggaattgttgtcaacaatatgttttacagttcagggcaaattccgctgaccccgtcgggtgaaatggtgactggagacatcacagaacagacgcaccaggttttccgcaatttaaaagccgtgctgaaagaagcgggcgcctctctggagactgtcgtcaaagcaaccgtgtttctggcggatatgaatcaattcacagaggtgaatgaagtttacggacagtacttcgatacccacaaaccggcgagatcatgcgttgaggtggcgaggctgccgaaagacgcgcttgttgaaatagaagtcatcgcattagtgaaatagaaagaactcttaaaagatggttttggtctcaaaatcatcttttttgtttggaaaatttgtcaattcagtgtttttttatcccaatattacaaaaatatttttaattatgcaggaaaacaaaaaaagccgttgaatagttacactaatgtttttatattgggaaaaggtggtgaactactgtggaagttaccgacgtaagattacgccgcgtgaataccgatggtcgcatgagagcgattgcatccatcacgctggatcacgaatttgtagtgcatgatattcgtgtaattgatggaaacaatggtcttttcgttgcgatgccaagtaagcgtacacctgatggagaatttcgtgatatcgctcatccaatcaactcaagcacccgcggaaaaattcaggacgcggtgttaaatgaatatcatcgtttgggtgacgttgaggaaatagaatatgaagaagctggagcttcttaaaaaagaagggcttatggataagccctttttgttttgaaaaaaaatgatcttatcataataaaatgacaatatatggtttgtgtctgcgtataacagtagcaggaaggtaaagcatgcgaactcggataacaaagcgcatgcagaaggaatcaatccgtctccctgatcagttaatcctaaatatgctctaaacatccaaaatatgctgtcttgatttcccgatttctcattttgtcttgcttgaaatcaactcatatttaggatatatttttctatggataatagggataatggaggccaatacatggataagcggtttgcagttgtgttagcagctggtcaaggaacaagaatgaaatcaaagctatataaagttcttcatcctgtttgcggaaaacctatggtcgagcatgttgtcgatgaagctcgcaagctatcattagaaaaacttgtcacaatagttggacatggtgcggaagatgtcaaaaaacagctcggggaaaaaagcgaatatgccctgcaggctgaacagctcggcacggcccatgccgtcaagcaggccaagtcgattcttggaagcgaaaaaggaacaacaatcgtcatctgcggagataccccgcttttaactgccgaaacgatggaagccatgctcacggagcatcagaaaaaagcagcaaaggtgacgattttaaccgctgtagcggaagatccgacaggctacggacgcattattcgcaatgaaaacggcgatgttgcaaagattgtcgaacacaaagatgcaacagaagaggaaaggcttgtcaaagaaatcaacacaggcacctactgttttgacaacgaagctctttttcaaacgatcgagcaggtttccaatgacaacgtacagggggaatattatcttccggatgtcattgagatcttgaaaaatcaaggtgaaactgtagccgcttatcagactggcaacttccaggaaacgctcggagtcaatgacagagtcgccctatcacaagcggaaatctatatgaagcagcggatcaataaacgccacatgcagaacggcgtcagcttaatcgatcccgacaacacatacatttcaccggaagccgtgatcggcagggataccgtgatttatcccggcaccgtcattaaagggcgggttgttatcggtgaagacgcggtcatcggacagaacagcgaactggaaaacagtacggtcggcagcagaacggtcattaagcagtccgttatcgtggacagtgaagtcggcgacgatgttacaatcggaccgtttgctcatatcaggcccgactcaaagatcggcaatgaggtaaggatcgggaatttcgtcgaagtgaaaaaatcggaatttggtgatcgcagcaaagcatctcatttaagctacataggggacgcggaaatcggaacggatgtcaatctcggctgcgggtcgattaccgtaaattatgatgggaaacataagtttaaaacgaaaattgaaaatggggcatttatcggctgcaactccaatttggtcgctccggtgacaatcggcgaaggcgcatacgtagctgcgggttcaacgattaccgacgatgtgccaggccgggctttgtcaattgccagagcaagacaagtcaataaggaagactacgctgagaacatacacaaaaaataatcctaaatcggaggtttaccatgtctaaatatgaagacgacaatttgaagattttttctttaaactcaaatccgggtcttgcgaaggaaatcgcggatatcgtcggagttgagctgggaaagagttctgttaaacgctttagcgacggtgaagtccaaattaacattgaagaaagcatccgcggctgcgactgctatgtcatccaatcgactagcgcgccggtgaacgagcatatcatggagcttttgatcatggtggatgcgctgaaacgcgcgtcggcgaaaacgattaatatcgtgatgccttactacggctatgcccgtcaggaccgtaaagcgcgttcccgcgagccgatcacagccaaactcgtggcaaatctgctggaaaccgccggagctacccgtgtgattgcacttgaccttcacgcgccgcaaatccaaggtttctttgatataccgatcgatcatttaatgggtgttccgattttaggaaattattttgaagagaaaaatttcaaggatatcgtgattgtgtcccctgaccacggcggtgtgacccgtgcccgcaaattggcggaccgcttgaaagcgccgattgcgattatcgacaaacgccgacctaagccgaatgtagccgaggttatgaatatcatcgggcatatcgaaggaaaaacagccattttaattgatgatattattgatactgcaggaacgattacgctggcggccaatgcgctcgttgaaagcggcgcagaggaagtgtatgcatgctgtacacatccggttctttccggtccggcgatcgaaagaatcgacaattccaaaattaaagagctcgttgtgaccaacagcattgagcttcctgaagaaaagaaaatcgcgaaattcaagcagctttctgtcgcaccgcttctggcagaagcaattattcgtgtgcatgagaaacaatctgtcagcttcctgttcgattaatttgctgattctggtttaaagttttgtcgttatgggaatggttttagaaagaccaatctaacgataggatggtgctgaaaatggcaattttaaaagcggaagaaagaacggattccagacggtcttctttaagaagaattcggcaatccgggtatgtgccgggtgtcatttacggaagaaatctggagaacaaatccgttgcgttagacagtatcgagcttttaaaaatcttgcgcgctgagggcaaaaatacgattatcaacttggatataaacggtgaccaacactctgttatggtgactgagctgcagacggatccgttaaaagattcaatcgtacatgccgattttaaagtggttgatatggaagcggaaatggaggcgacggttcctgtaaaccttacgggtgaagcagagggcatcaaacagggcggtgttcttcagcagccgctttacgagctgtctgtcacagcaaagccgaagaacattccgcagacgatcgaggttgatatttccagtctcgaagtcaatgatgttctaaccgtcggcgatattccgaccaaaggcgattattcatacaaccatgagcctgatgaagttgttgcatccattcttcctcctcaaaagcaggaagaaacagaagccgaatcagctgctcaagacgttgaggaaccagaaaaaggcactgaagaggaaaaagaagaataaatacgtaagacgtaatccgcccgcggttacgtcttttgtgctagaatgaggggaaattaggatgctccccctcagtatgctgaggcagggttttgcttaagggaggatatagaataatgcttgtgtttgcaggattgggcaatccgggtaaaacatatgaaaatacgagacacaatgtaggttttatgacgattgacgagctctcgaaagagtggaacattccgcttgataaaacaaagttcaacggacaatacggaatcgggtttgtttccggcaaaaaggttctacttgttaagccgcttacatatatgaatttatcgggagaatgtttgaggccgcttttggactattacgagatccctgttgacaatttgaaagtgatttacgatgatttggatcttccgaccggaagaatccgtctgaggacgaaaggaagcgcaggaggccataacggcatcaaatcgacgattcagcatctgggaacaagtgagtttaaccggatcagaatcggaataggccgtccggtaaacggcatgaaagtcgtcgattatgtgcttggcgcttttacagatgaagaagagccggcgataaaagaggccgtcagacaatcggccaaggcctgtgaagcttctttggaaaaaccttttttagaagtcatgaatgaatttaacgcaaaggtataaggcaaaagggaacggaacatactagtcttaaaaagactcggtatggaggttcctttatggctttacattattattgccggcattgcggcgttaaagtcggaagtcttgaccattcttatgtaaacagtgaacagttaggctttaaccacttaacaaatgatgaaagaaacgatatgatttcttatatggataatggggatttacacgtgaagacgatatgtgaagattgtcaagaagcgcttgagcgaaacccggattatcaccaatatcattcatttattcaatagatagctttggtgtagagactagaccaaagcatttttctatttgaggaagagaggaggggctcatttgaacaatattcaatcctatataacaaaaagcgatgattttaaatccatcgtcaacggcttgaacgaagggctgaaggaacagctgcttgcggggctctccggatctgcccggtcgttatttacagccgctcttacaaaagaaacgagacggccggtatttttaattacgcataacctttatcaggctcaaaaaattacagatgatttaacagggctgataaaagatcagcctgtccttttatatcctgtcaacgaattgatttcttctgaaatagcggtggcaagccctgagctgcgctcgcaaaggcttgatgtcttaaataggcttgcaagcggtgaaacgcctatcgttgttgctccggcagcagccgtcagaagaatgctgcctcctgtcgaagtatggcaaaacagtcagattcacattgagacggggcgcgacattgacacggaacagctgctccagaagctcgttcaaatggggtatgagcgtacagatatggtggcggcgccaggcgaattcagcatacgcgggggcattatcgatgtctactctttgactgaagaaaatcctgtccggattgaattgtttgatacagaagttgactcgattcgtatattcaatacggatgatcagcgctcactggaaacgcgcgatgaagtaacgatcggccctgcgaaggaactgatcgtgcgggatgaagacaggcaaagggcgcttgaacaaatcgatcaaggccttgccaacagccttaaaaagctgaagctcgataaacaaaaggaaattctcgaccaaaatatcgcggaagacaaagagcggctcaaggaagggcatatcggccaggaaatggtcaaatacctttcttatttctatgagaagcctgctagtttactagattatttcccgaaaaataccttgcttatactagatgaaataagccgtattcatgaaatggaagaccagctgcaaaaggaagaggcagaatggattacgagcctgcttgaagaagggaaaatccttcatgatacatcgatgtcatttccttttcacagcctcatttcaaaacagtcccgcccgattttgtattactcgctgtttttaaggcatgtgcagcacaccagtccgcaaaacatcgtcaatgtttcaagcaagcaaatgcagagctttcacggacaaatgaatgtgctcaaaaatgagatcgaacggtttaaaaaatcgaaatatacgacggtttttctcggagacagcaaagagcgcgtcgaaaaactagcatctgtactgtccgactatgacatcgaagccgcacaggccgaccaggatgcagcgctcgcccaaggccagatttacattatggaaggcggtcttcaatccggttttgagcttccgatgatcaagctggccgttatcacggaggaagagctgtttaaaaagcgtgtcaaaaagcaggcgcgcaaacaaaaactgaccaatgccgaacggattaaaagctactcggagcttcagatcggcgattatgtcgttcatgtaaaccacggtatcggaaagtatttagggattgaaacgttggagatcaacggcattcataaggactacctgaatattcactaccagggaagcgacaagctttacgtaccggttgaccaaattgatcaggtgcaaaaatacgtcggttccgaaggtaaagagccgaagctttataaactcggtggaagcgaatggaaacgggttaagaaaaaggttgaaagctctgttcaggatatcgccgatgacttgatcaagctctatgccgaaagagaagcaagcaaaggctacgcgttttcacccgaccatgaaatgcagcgtgaatttgaagccgcatttccttatcaggagacagaggatcagctgagatcgatccatgagattaaaagagacatggaaaaagaaagaccgatggaccggctcctttgcggcgatgtgggctacggcaaaaccgaagtggcgatccgcgcagcttttaaggcgattgcagacggaaaacaggtcgcgatccttgtgccgactacgatcctagcacagcagcactatgaaacgatattggagcgctttcaggactacccgattaatatcggtttgctcagccggttccggacgagaaaagaagcaaatgaaacgatcaagggcttgaaaaacggaacggtagacatcgtgatcggcactcacaggctgttgtccaaggatgtcgtatacaaagatcttggtctgcttatcatcgatgaagaacaaaggttcggtgtcacacataaggaaaaaattaaacgcattaaagcgaatgtcgacgttttgacgttaacggcaactccgatacctcgaacccttcatatgtccatgcttggtgtcagagatttgtcagtcattgaaacgcctccggaaaaccgcttcccggtacagacgtacgttgtcgaatacaacggggccttggtcagggaagcgatagaacgcgagctggccagaggcggtcaggtttacttcctgtacaaccgggtggaggatattgaaagaaaagcagaagaaatctcgatgcttgtacctgacgccaaggtgacgtacgcccatggaaagatgacagaaaacgaactcgaatcggtcatgctgaacttcttagagggagaatcggatgtactagtcagcacgacgattattgagacgggcgttgatattccaaacgtcaatactttgatcgtatttgacgcagacaagatggggctttcccagctgtaccagctgaggggccgcgtcggccgctcaaaccgtgtagcttacgcttattttacgtaccggaaggacaaagtcctaacggaagtggctgaaaaaaggcttcaggcgattaaagaatttacagaactcgggtcaggatttaaaatcgcgatgcgcgatttgacgatccgcggcgccggaaaccttttaggtgcgcagcagcacgggttcatcgattctgtcggtttcgatttatattcgcaaatgctcaaggaagcaatagaggcgcgcaagggagatgcaccgcaagctgaaaagtttgagccggaaatcgatttggagcttgacgcatatattccgcagacgtatgtgacagacggcaagcaaaaaatagatatgtataaacggtttagagcgatttcaaccattgaagaaaagagcgagcttcaagacgagatgatcgaccgcttcggcgaatatccgaaagaagtagaatatttattcgccatcgctgaggcgaaggtatatgccatcaaggaacgcgtcgagctgatcaaacaggataaagacgccgtcagactgacaattgacgaaaaagctagtgccgaaattgacggtcaaaaactgtttgaactcggcagcaagtacggcagacagatcggccttggaatggaagggaagaaattgaaaatctcgattcaagtgaaaaaccgaaaaccggaggaatggctggaaacgcttctcgacatattgaagggccttcaaaacgttaaaaagcaaacgatcgcttcatcgtaaaaatttgttgtttctcgcgtatattacatttgatgtgaaggatactaaaaccaatcaagagtggagagtgttacataagtacacagctctgtttatatccaccagatatatcatcaaatgaaagagaggcagcagagatgaaagcaactggtatcgtacgtcgaattgatgatttaggccgggtcgtgatcccgaaggaaatccgcagaactttgcgcattcgtgaaggagaccctttggaaatatttgtggaccgggatggggaggttattttaaaaaagtattctccgatcagcgagctcggcgactttgcaaaagagtatgcagatgcgctttatgacagcatgggccattccgtgctgatttgcgaccgggatgtgtatatcgcagtatccggggggtctaaaaaagactatttaaacaaatcgatcagcgacatggtcgaaaaggcgatggatcagcgcacttctgttttggacggagacgcgaagacgattcagcttattgatggtattgacgaagaggttgcttcttataccgtcggcccgattgttgcaaacggcgacccgatcggagcggttgtcattttttcaaaagaccagtcaatcggcgaagtggaacataaagcggttgaaactgccgccggctttttggcccggcaaatggaacaataggtctcattccttttattttgacattcctgctcaaacgagccggaatgccgaaagtgttttttctcagcttgaatcagcatcagcattggaacagcaccttttgggctgttcttttttaattcacacttgcaggaggggtgcaagccctgaatatggtataataagctcgtttcgtgcgctttttagaaagcgcattggaaggagcttaaaggaatggggtttttaaagggccaaagacaattgctttggcaaggcgcctttgtactttcattggcggggatattatcaaagatattaagcgctgtatatagagtgccttttcaaaatatagttggagatgtcggtttttatatttttcagcaggtgtacccgatgatcggaatatctgtcatgcttgccacctccgggttcccggtcatcatttcaaagttgctgaatgattacgggtccgcaaaccgggcaaagattctccgcgtgtctatgctctttttatcggctgtcggcctcggcttttttctactcttgtttgccggagctggagccatcgcagggtttatgggcgatctcgaccttgccggggtgatccgcgccgtgtcgttttcttatttgctgcttccgtttgtgtctttgctgagaggctattttcaaggaagcgaacggatgctgccgacggcactttctcaaattggagaacagacacttcgggttggggcgattcttgttttgacgtggtggctcgtcaaaagcggcttttccttatatgacgccggtgcaggggcggcctttggctctcttgtcggcggccttgcggcgtttttcattctcgccgtgttttgggccaagcgtgaaaagaaagccactgccgtccgaattgaggccgggacgggtgatattttaaaacagctgtgtctgtattcggttacgatttgtaccgccggcctcatgctgatcctcatccagctcgtcgacgcattgcacttgtattcattgctggccggacaaggaatggacgaacttcaggcgaaacatacaaaaggagtgtatgacagggggcagccgcttttgcagctgggaaccgtttttgctgcgagcattgcgacggctcttgtcccgtcccttacgaaagcgaagaaaaagggagaaactgcagtgctggaggaaaagatccggtattcgctaaaaatgagctttgtcatcggcactggagcagccgccggtctgatttgtattttggagccggtcaatgtcatgctgtttaaaaacagcgatggaacggctgcgctccaaattttcagcgcgtcgattctctttgcatcgctggcgatgacgatgactgctgttttgcaaggactcggcaatacatgtcttccggctgtattcgtctgctgcggcattttggtgaaagccgtattgaacgagcttctgatccccggtttcggcatttccggcgctgcttttgctactatgatgtcatttgccgctgttgcggggctcaatttttttcagctgaaaagaaaaggctggattaagctgtcggaatacaggatagcgggtgttttgttgtcggctgtgatcatgtcggccgctctggcggtgtggctttttgcatttgaagcggccataccacataaaagcagatggatctcagcggcggaaagtcttagcgcagttttcgtcggcggcgttgtctttttgtccggtatcttcacattgcgcgtgttttcagaaaaagaacttgagcttgtgccttttggcagcaagctcctgacattaaaacgagaaaggggcggcaggcatgggcggtaaaatcacggtagtcggccttggggcaggcgatatgaatcaattaaccctcggtgtatataaacggctcacacaagcggaggttctttatgtcaggacgaaagaccatccattaatagaagacctgaaaaaagaaatagcggagattcatttttttgatgaggtctatgaaaagcatgatcaattcgaagatgtttacgaggagatcgtagagcggctttttgaggaggcgaagcagggggatgtgctctatgccgttccaggccatccgttcgtcgctgaaaaaacggtccagcttttgcttgagaggcgtggggctcatcaggccgatgtcgtcgtcgagggaggccacagctttattgatgcgacgttaaatgctttgcagatcgatccgattgacgggtttcagtttgtcgatgccgtccggttttcagccgacgaagtcgagctccgtcatcatttgattatttgccaggtatatgatcaaatgacggcttcagaggtcaaactgacgttaatggaaaagcttcctgatgactatgaagtcgtcattgtaacagcggccggaagcagcatgcaagacattcggacagtgcctctttacgaattggacagaagcgtgggcatcaataatttaacgagcgtctatgtgccgcctgtcaaagacgaagagattctccaccaggaattttcgatgttccgcagtgtcatcagaaagctgcgcggaccggacggttgcccttgggaccgaaaacaaacccatgagtcgctcaaaaagtacttaatcgaggaatgctatgaggtgctagaggcgattgatgaagaagatcccgaccacttagtagaggagcttggcgatgtgatgctccaagttcttctgcatgcgcagatcggcgaggatgacggcctttttacaattgacgatgtgattcgcggcatcaccgcaaaaatgatcagaaggcatccgcacgtcttcggagaggtctctgttcgtgatgaggccgacgtcatggtaaactgggaagagatcaagaagcaggagaaacaagcggacgataaatccctcctcgacgatattccaaagccgcttcctgctttgtcaaaagcgaacaagcttcagaaaaaggcggcaaagaccgggttcgactggtcgaatgtccaggatatttgggataaagtccaggaggaaatgaaagaattttcttcagaaatttccgaagccgaacagcacagcaaaaaaatgaaagaagagttcggcgaccttttattcgcgctcgtcaatatcggccggttttataaaattgaaccggaagaagccctcgcgatgacaaacgccaagttttacagaaggttcacatatattgaacaatctgcaaagcgcatgggcaaggatctggaaagtatgacgcttgaagaaatggacgaactgtggaatgaagcgaaaggcattgaaaggagctgacaagcgatgagactcgacaaatttctcaaagtatcaaggctgattaaaagacggacgcttgcaaaagaagtggctgaccagggaagaatttcgatcaatggccagcaggcgaaagcaagctctgttgtcaaagcgggggacgagcttgcggtgcgtttcggccaaaaacttgtaaccgtcaaagtcaatgaattgaaggatacgacaaaaaaagaagaagccgctgatatgtataccgttctcaaagaggagaagctgggaggagaataggcttgttctaaaaaaatcccccgtctcatacaatgcagtatcgaatctttagtatgaggatatgggggatgaatcgatgaatgtatattatgatcagcacaacccttccggcggggcatctggtcctgaacataatgtgacgatgaagggccgcaagcttctggatatatccggtgtcaagcaggtcgagagctttgacaacgaggaatttttacttgagacggtaatgggcatgcttgcagtcagaggcgaaaacctgcagatgaagaatctcgatgtggaaaaaggcgttgtctccatcaagggaagagtgcttgatctcgtctatttggatgagcagcagggggagaaagctaaaggattttttagcaagttgtttaaatgacgctgaccacacagttctatacgatgctggccatggccggaatgggggcatggcttggcgcttcccttgacacctatacccgttttgtcgttcgctcgaaaacagcaaggtggctgttgtttctccatgactttttgttttgggtagtacaaggcctcctttttttctatgttttgctgagcgtgaatgaaggggaattccgaatttatatctttctggcggtcatgcttggttttgccgcttatcagagcctttttaagcaggtctatatcaagcttttggaatggatgatttccttttttatattcatctccaggctgggctcaaagatgatgcggatgatggtgtttcggcctgttgtatggacgtttaaagccattttagccatcattctctttacaatgagaaatatctatgttctttttcgtttttttgcggtatgtttatataagatattaaaatttgcaggatacccgatttattttatactatatcaatgctgcaggcttcttcccgccccggttcggggattgttgagacgctttttgcaaaaaggagcaggatttttcgaaaaggggaaggaactattcataacaattaaggcaaaacttttaaaaaaatgaagggaggccgtctggaatgaatgatcccacaagacgcaacatatcgcaaatacagaacgaatacaaagagcagatggagcgaaaacagcagcagctgaaaagaaaaagacgcggtctatacagacggttgatggttttcggcgccgttgtgctgctgtcggcgattgtgattgtcagctcgctctggtcgcagacttcggatatcagcgcgaagcaagagaagaaagctgagcttttgaaacaattggaacagctggaagcaaaaaaatcggatttgaaagatgagattgtgaaattaaaggacgaggactacgttgcagagcttgccagaaaggattactacctctcaaaggatggcgaaatcatcttcaagtttgaagataagagcaagtagccttgttgacacttaattttttctttatgtataattaaacaaatgatcttttttaagtctaaggaggagcactttttttatgtcgattgaagttggcagcaagttgcaagggaaagtaacaggtattacaaatttcggagcgtttgttgaactgcctggaggatcaacaggtcttgttcatatcagcgaagtagccgataactacgtgaaggacattaatgatcatctgaaggtcggtgatcaagtagaagttaaagttattaatgttgagaaagatgggaaaatcggcttatcgatcaaaaaggctgtagaccgtcctcaatcatcaagacctgcgagacctaaaaatgatttccgctctaaagaaacgtttgaacagaaaatgaataagtttttaaaagacagtgaagatcgcttatcgtctctaaaacgcaacacggaatcaaaacgtggagggcgcggagcaagaagaggttaacttgctgctttctaaacgaaaggcattcgtcttatcccaacggatgcctttttattttctaataaaatttttattaaaatttctattgacggatagggcaatcctttgtattatagaacttgtgcgttaaaagaaatcaacaacatggcggtgtagctcagctggctagagcgtacggttcatacccgtgaggtcgggggttcgatcccctccgccgctacttatatgaaggcccgttggtcaagtggttaagacaccgccctttcacggcggtaacacgggttcgaatcccgtacgggtcattccggaaaccggcttcttctgaagccggttttttgctgcataaaaatatgcaaaataacgggaatggactcgacttatcaagagtgattgaagcatgctacaaaaagcgtcgaacagttctttgaattcgttaccttcttttgacaaaatcctatttcatctttcgctataatggcaagcaacgaataaacgagtgggagatgagagcatggaaaaagcggaaagaagagtgaacagcccaatagctggacctgctgttcaaaaattgtattcatggtttggcagcatgacgaagcttatgatgcagcatttatattccctctttttttataaagggctgatctatatggtcatcggttttttattgggacgagccttcattctgtcagaggtcattccctttgctcttccatttttcggagcgatgcttttaatcaaaaaagataaagctttccttgcatgcctggcgcttcttgccggagctctgagcatatcgcctcagcattcgctgttcgtgcttgcggctctgtttgcatttgcgatatgtacaaaaatgacgtcccttattataaaagaccgtgtcagaacgctgcctgtcgtcgtctttttggcgatggctgtgacaagatgcggattcgtatatgccgaatacggaacggtttcaggttatcactatattatggctttcgttgaagccggattatcgtttatcctcacattgatttttctgcaaagcctgccgattgtcacatcaaagcggcagaaacagtcgctgaaaattgaagagatcatttgttttatgattttaatcgcttccgttctcacgggcttgacaggcgtttcatttcaaggcatgcaggctgaactgatattggcccgttatgtcgtgctcgctttcgcgttcatcggaggcgcaagcattggctgtacagtcggggttgtgaccgggctgattctcagcctctcaaacatcggcaatttatatcagatgagcctgctggctttctcaggccttctcggcggtttgctaaaagaaggaaaaaagttcggcgcagcggtcggcttattgattggatctctattgatttctctgtacggagaaggttcggctgaattagtgccgacgctttatgaatctctgattgcaatcggcctgttccttttaacccctcagtcgattacgaaaaaagtggccaagtatatacctggaacgactgagcacgcccaggaacagcagcagtatgcaaggaaaatccgcgatgtcaccgcccaaaaagtcgatcagttttcgaacgtttttcacgctttatccgaaagcttcgctaccttttatcattcagctccggacgatgaaggaaaagaaaaagagatcgatctgtttttgagcacggtgacagaacattcctgtcagtcatgctataagaaaaacaagtgctgggttcagaactttgataaaacatatgatttgatgaaacgggttatgcaggaaacggaagaaaagcaatattttaaaaaccgcaagctgaaaaaggagtttcatcagcactgctccaaatcaaagcaagtagaagcgctgattgaagacgagctgactcattttagggcgaaccagacattaaaacaaaaggtgcatgacagcagacgtctcgttgcagagcagcttctcggcgtttctcaggttatggcggacttttctcgggaaataaaaagggaaagggagaagcattttattcaagaagagcaaattcgggatgcgctgcagcacttcggcatcgagattcagcaagtcgaaatatacagccttgagcagggaaacatcgatattgaaatgagtatcccgtattgcaacggccatggagagtgtgaaaaaatcatcgctccgatgctgtccgatattttggaagaacaaattatcgtcaaagcagaacagtgcgccggccatccgaatggatattgtcatgttgccttcggttcggcgaagtcatacagggtggtgacaggagccgcgcatgcagcaaaaggcggagggcttgtctccggcgacagctacaatatgatggagctcggcaccggcaaatatgccgccgccattagcgatggtatgggaaatggcgcaagggcccattttgaaagcaatgagacgatcaagctgctggaaaagattcttaagtcgggcatcgacgaaaaagtggcgattaaaacgattaacagcattctttcattaaggacaacagatgaaatttattcgacattggatttatcggtcatcgatcttcaggatgcgagctgcaagtttttgaaaatcggctccaccccgagctttattaaaagaggcgatcaaattataaaagtgcaggccagcaatctgccgatcggcatcattacagaattcgatgtcgatgttgtcagcgagcaattaaaagcgggagaccttttgatcatgatgagcgacggaatctttgaagggccgagacatgtggaaaatcatgatctgtggatgaagcgcaaattgaaatcgctgaaaaccgaggagccgcaggaaatcgccgacttaatcatggaagaagtgatccggacaaggtcgggtctgattgaggacgacatgacggtgattgtcatcaagctggaccataatacgccaaagtgggcctccattccggcgccggcttttttccaaaagaatcaagagatttcttagcattcgtataaatcaaatttcttctggcgatgatggaactaaatcaagatatctttgtccaggaggaataaaaacgatgaaaaaggggcatttgaatcaaatcctgcttttgacggacggctgttcaaaccgcggcgaagacccgcaggccatggctgcctttgcgaaagagcagggaattaccgtgaatgtgattgggattatggacgagcatgaaatggatcaggaggcgatgaaagaagtcgaagggatcgctctcgcaggcggaggagttcaccagttggtttacacgtcgcagctgtcgcagaccgttcaaatggtgacaaaaaaggcgatgacgcaaaccattcaaggcgtggtcaacagtgagctcaaacaaattctcggcaagcataccgaaatggatgaactgcctcctgataaacgcggtgaagtcatggaagtcgttgacgagcttggtgagaccgtgcatcttcatgtactggttcttgtcgatacaagcgcaagcatgaatccgaagcttccgaccgttaaagaagcgttgatagatctttccatcagtctcaattcaagaatcggcgaaaacgaatttgcgatgcttatatttcccgggaaaaaacaagaggtcgaacttgtgctcgattggaccccgaagtttgaatctctttcttcaatattttccaagctttcagccggtggcattacaccgacaggacccgcaatacgagaggcgattcagcattttaacaaaatcggctcaagaaggagaatgttagaagacgatgaaaaacgcttcgacgagtttggcggctagtctaaagccgggtgcagccgttgttggaaagtggaacaatcattcctacaagatcatcagacagcttggaaaaggggcaaatggggttgtttatctggccgattcaagaaagggccgggttgcattaaaagtgagcgatgacagcctgtccattacctcggaagtgaatgttctgaaatctttctcaaaggcccaggcaaaagcaatggggccttctttttttgatgtggatgacatgatggttacaggcaccggcaaaaaactttcattttatgtcatggaatatattgaaggtccgcttcttttaagatatgtaaacgaaaaaggcgaggaatggactccggtgctgatcagccagcttctctcaagcctgtcggcgattcatcgcgaaggatgggtgtttggagatttaaagcccgagaatttaatcgtgacgggtcctccgccgcaaatccgctgcattgatgtgggcgggacgacaaaagagggccgggcaattaaggaatatacggagttttttgacagaggctattgggaattcggcactcgtaaggctgagccgtcgtatgacctgttttcagtcgccatgattatggtgaactgtgcggtgaaaaaagaattcaagaagacagcaaggcctcaggagcagctcatgtcagtcattgacggacatccgtttttaaaacggtataaaccggttcttgcttctgctttaaaaggaagctatcgaacagctgatgaaatgaagggagatcttctggaaatcggccggccgccacgaatgcaaagcagccgccagtcgagaacagcccgttcctcatcggcatctgccccgtcgcaaggcctgcggcataagcaggggacgcctcagcagcaaaggttaaggagcgggcgcagaaagcaaagaaacccttctaaatccggcggtgtttttgaaacgctgttgatcgtcgtaagcgttcttgccctttactttgcgtatatcgttctcttttttatttagctgtgcattctcggcggatagctcttctttgcagggaccgattgaaagtgttaggatatttatatcttttgaaatacaccctgctcttagtgggaggacattgtgaaaagtattgaagatttcatgaaaaaatacgaactgtcatttgatggagtgacgctgattgcaggtgtctccggcggacctgattcgatggcgcttttgcatgctctgcaccatacggttcccgcttctgcaacgctgattgccgcacacgtcgatcatatgttcagaggcgaagagtccgagcgtgatatgcggttcgttcaggactactgcgaggcggaaggcatacaatgcgaggcggtgcaaatcgatgtcctggcatttgccgctgaaaacaatctgaataaacaggctgctgcgagagaatgccggtatgcgttttttcaagagttaatgaaaaggcaccgggccgaatacctggttctgggtcatcatggagatgatcaggtggagacgatgctgatgaagatggcaaaaggcactgtcggaatcgggcttgccggaattcagccaaagcgccgttttgacagcggctggctgctcaggccgtttctgaggctgtcaaaggatgatcttttggcttactgcaaagagaatcgaataccgtttagaaccgatccgagcaacagtgaggatgattacaccaggaaccggttcaggcaccatgttctcccttttctgaagaaagagtcggaagatgtccataaaaggtttcaatccgtcagtgaattcctgacagaagacgaattatacttacaggcattaacgaaagacaaaatgaatacagtaatcacaagcaagtcaagttcaggcgtggaaatcagcatcgaacgacttcttgcgctccctatgcctttacaaagaaggggagttcatctaatattaaactatctttatgaaaacgttccatcagcgttttcagcccatcatattcaagtgtttctggattggatttcacaagacggaccatccggttcccttgattttccgaatgggttaaaagtcgcaaaatcttatcatacatgtttgtttacatttcagcgtttacaatgtgaaaatgtttcctatcattatgaaataagcggggcaggcgaagaagaactgatacttcccggcggctcctcccttcatgtgagcggacccggttcaacccggaagctgcaaggaaatgatgtttttgcaacaagtcccaagcaggttcagtttcccctttacgtacggacaaggcaaaacggagaccgagtcaaacttaaagggatgaacggctcaaaaaaggttaaagatatatttattgatgaaaaagtgcctctttcaaaaagagacagctggcccattgtaacagacgcggttggaaacattatctggatacctggtctgaaaaaaaccatttttgaggaacttgatgttacaaacaacgatcgcattgtattacaatatagacagcatgaaaagtgtagggggctagcaaagaatgaaacaggatattgaaaatatcttgatctcggaagaagagatccaaaagaaagtcaaggagctgggcgcgactctgacagaagagtacagcggcaagtttccgctggcaatcggtgtgttaaaaggagccatgccgtttatggctgatcttttaaagcatattgatacatatctggaaatggatttcatggatgtatcaagctacggcagttccacggtttcttccggagaggtgaaaatcataaaggatttggacacatctgtagagggccgtgacatcttaattattgaggatatcatcgacagtgggctgaccttgagttatcttgtagagcttttccgataccgcaaagcaaaatcgattaagatcgtaacccttcttgataaaccaagcggacgaaaagcggatatcaaagcggattacgtcggctttgaagttcccgatgctttcgttgtcggatacggtctcgattatgctgaacgctatcgtaatcttccgtacatcggagtgctgaaacctgcggtttatgagagctgatacgggcttgttagcgaaagggatatctgttgtattggaacgattttctatgatactattgaacatagttgtgcttactgtgggaggaggtaaggaatgaatcgggtcttccgtaataccattttttatttacttattttattagttgtgatcggagttgtgagctacttccaaaccgcaaatccgaaaacagaaaatatgacgtatagtgactttgtttcaaacctagaaaacgggaaggttgaaaatgtctccatccagcctgtcaggggtgtgtacgaggttcgggggcagctgacgacctatgagaaagatcagtatttcctgacccatgttcctgaaggaaaaggggcagatcaaatcattgatcaagtgaaaaaaacgaagatacaaatagaacctgcgcaagaagcaaatggatggatgacgttctttaccaccatcatcccttttgttattatcttcattcttttcttcttcctgcttaatcaggctcaaggcggcggcagccgtgttatgaactttggaaaaagcaaggcgaagctctatacagaagaaaagaaacgcgtcaaattcaaagatgtggcaggagcggatgaagaaaagcaagagcttgtggaagtcgttgatttcctcaaggatccccgcaaattcgccgagctcggtgcaagaattccgaaaggcgtgcttttggtcggacctccgggtaccggtaaaacattgctggcgaaagcatgtgccggtgaagcaggggtgcctttcttcagcatcagcggatctgacttcgttgaaatgttcgtcggggttggtgcatcacgtgttcgcgacttgtttgaaaacgccaagaaaaatgcgccgtgtctgattttcatcgatgagattgatgctgtcggacgccagcggggagcaggccttggcggaggtcacgatgaacgtgaacagacgctcaaccagcttcttgttgaaatggacggattcagcgccaatgaaggaatcatcatcatcgctgcgacaaaccgcgccgatattttagaccctgcattgctgcgcccgggacgttttgaccgtcaaattactgttgaccgcccggatgtcaaaggccgtgaagctgtacttcaagtacacgcaagaaacaagcctcttgatgaatccgtaaacctaaaagcgatcgcgatgcggacgccagggttctcgggtgcagaccttgaaaaccttttaaatgaagcggctcttgtggcggcgcgtcaagataagaaaaagatcgatatgcgagacatcgatgaagcgacagaccgcgtcatcgccggacctgcaaagaaaagcagggtgatctcgaaaaaagaacgcaatatcgtggcttatcacgaggcgggacacaccgttatcggacttgtcttggatgaggcggatatggtgcataaagtaacgattgtaccgcgcggccaagcaggcggatatgccgtcatgcttcctaaggaagaccgttatttccaaaccaaacccgaacttctcgataagattgtcggcttgcttggaggccgtgtagctgaggaaatcatcttcggcgaggtcagcacgggcgcccataatgacttccagcgcgctacaggcattgccagacgaatggtaaccgaattcggtatgtctgaaaagctcggtcctcttcaattcggacaatcgcaaggcgggcaagtattcttgggtcgagatttcaacaatgaccaaaactacagcgacgcgattgcgtatgaaatcgataaagaaatccagcgcttcattaaggaatgttatgaacgtgcaaaaacaatccttactgaaaatcgcgacaaacttgagctgatcgctcaaacattgctggaagttgaaacgctcgacgctgagcaaatcaagcatttgtctgagcacggaagacttcctgatcgaacatactctgatgatcaggagaagacagatgatgtgaaagtcaacatcaataaacgagatgacgaagagaaaaacgaggatgaaaaagagtaatgacgctttttcgtctcttcaggaaaactgccaagctctgcttttggcagttttcttttttttatggctgaaaaaatccgctttggaaaatctttctcctcaccggtttgattcgtttacaaacagaatcggcatcgtgtattgtatgatggtagaatgttttatgtccaagtaagagaaactagtcaaaagtggtgatcagaatgttgcttgttatagatgtaggaaatacaaacaccgtccttggcatctaccacgaaggagagctcgaatatcattggcggattgagacaagccgccataaaacggaagacgaattcggcatgcttcttcgttctttatttgattatgtcggactgatgtttgaccagatcgaggggattattatttcatcagttgtaccaccgatcatgttctccctcgaaagaatgtgtatcaaatattttcagatcgagcctcagattgtcggtccgggaatgaaaacaggattaaacataaaatacgataatccgaaagaagtcggagcagaccgcattgtaaacgcagtagccgctattcatctctatggcagccccttgattgtcgttgattttggaaccgctacgacgtactgttacattaatgagcgcaaggaatatatgggtggtgcgatcgcgccgggcatcacgatttcaactgaagcgctttattcaagagctgccaagcttcccagaattgaaattgcacggcctgatcatatagtcggcaaaagtacggtcagcgcgatgcagtccggaattctttacggctatgtcggacaggttgaaggcattgtcaaacggatgaaatggcagtctaagaaaaatccgaaagtcatagcgacgggcggccttgcttccttgattgcagacgaatcggactgcatcgatattgttgacccgttccttacgttgaaggggctagagctcatttatgaacggaatcgtgttgaaagtgtataggaggatgaggtatggattatttagtgaaagccattgcatatgacggcaaagtgagggcatatgcagcgaatacaacagaaacgattcatgaagcccaaagaaggcataacacatggcctaccgcttccgccgctttaggaagaacgatgacggcggctgtcatgctcggcgccatgctgaaaggcgaagacaagctcaccgttaagattgaaggaggcggaccgatcggcgcgattgtcgctgacggaaatgcaaaaggagacgtcaggggatacgtgtccaatccgcacgttcatttcgacttaaatgaacacggcaaacttgacgtcagaagagccgtcggtacgtcaggaacgctaagcgtagtaaaagatctcggtctccgcgatttatttacaggccaggttgagatcgtttccggagaaatcggcgaggattttacttattatctcgtgtcctctgaacaggttccttcttcggtgggtgtaggggtgctcgtcaaccccgacaatacgattttagctgcaggcggatttatcctgcagctgctgccgggaacggacgacgaaaccatcacgaagcttgaaacaaacctttcacaagtggagccaatttcaaagctgattcagaaaggtttgacacctgaggaagtgctggctgcggtattgggagaagaaccggaagtactggaaaccgttcctgtccgatttacatgcaattgttcaaaagaacgtttcgcaagaggcatcatcggtcttggcaaggatgaaattcaacagatgattgatgaagatggccaagccgaggctcaatgccatttttgcaatgaaacgtatctgtttacaaaggaagagcttgaagcgcttcgagatgaaatataagcccgctatccagtagcgggtcttttacaatggggaaaggggagacaccatattgaaatcgagaacactttggccgattattttaggtgcgatcttcgtcaattgcattgtgatcgcgtatgttctgacgaaagcgcagaccgcttcttcatcgtcagctcaagaagtcattgcccatatcggaaaaaacggcatcacgcgtgaagaatggctgagcgaaatggaagagcgctacggaaaatcaacccttgaagatatgatcaacgaccgcgtagttacccaaatggccgaaaaaaacaagatcaaagtgtctgatgatgacattgaaagagaatttctgctgattaaagctgtatacaattccttctacgaagacgaaaacacaacagaaaaagaatggaaagagcagatcaagcataatattcttcttgaagagctcctgacaaaagacattgtcatttctgacagcgaattgaagtcattctataacaaaaataaggacttatataaattcgatgattcttatcgcctcaagcatatcgttgtcaaagataaagatgaagcagaacaagttcttaaagaactgaaggaagggtccagttttgaagcggccgcagccgaacactcgactgaccggtatacggctccttacggcggcgacctcggtttcgtcaatgatcagcatgaaaacgttccggccgaatatttggagaaagctgaacaactaaaggaaaatcaatgggtggatgaaccgattaaaacaagccagggctatgcgattatccagctcaaagaaaagctcccggggcaagctttcacttacagcgaagtgaaaaatcaaatcagaaggcagatcgcgatggatcaattaggcgataaagcttctgtcaagacgctctggaaagatgcgaaagtgtcttggttttatgacgataaaaaataaagattgacaaaatattttgatattgataaattagatataatcccaataaaattactcggaaattgaggtgttcaaatggttcgcgttgcaaactctgtttatgacttaatcggaaatacacctgtcgttaaattaaatcgactagttgatgaagacagtgctgaagtatatgtgaaactggagtatatgaaccctggaagcagcgtaaaagaccggattgcgcttgctatgatagaagacgctgaagagaaaggccttctgaaagaaggagatacactgattgaaccgacaagcggaaatacaggaatcggacttgccatggtcgctgcagcgaaaggcatcaaagcgattcttgttatgcctgatacaatgagttctgagcgccgcaaccttctgcgtgcatatggagctgagcttgtgctgactccaggtgctgagggaatgaaaggcgcgattaaaaaagcggaagaactggctgaggaacacggctattttatgcctcagcaatttaacaaccctgcgaacgcagaagttcaccgccgcacgacgggaaaagaaatcgctgaacaattcggagacggtttagatgctttcattgcaggtatcggaaccggcggaacgataacgggtgccggagaagttctgaaagaaaaaaatccgtccatcaagattttcgcggtggaaccgactgattctcctgttctttccggaggaaaaccagggccgcacaaaattcagggaatcggagcgggattcgttccgaaaatcttgaatacggaaatttacgatgaaatcatcacagtgaaaaacgaagaagcctttgaatttgcccgtaaagcggcgagagaggaaggaattctcggaggaatttcttcaggcgcagccatctgtgctgctcttcaagttgctaaaaagcttggaaaaggcaaaaaagttctcgctgtgcttcctagtaacggagagagatacttaagcacgcctctttaccaatttgaataggctccagctgaaacaggaggctgccgacgatgtcggcggccttttgtttgtcatggagcgcagcccttttaaaagctcggtgtccttgagtgaacatgctcaagggcttttttctgtattggaaatgaaattctcttttcctagaaaaaagatatgcattacaataaggacattagactaacggcagaggaatgatatgatgagacaacgaaggcctgtagccagagcgttcccattttccaatcaacagtttttgcagcaatatgaaagcctatcgaaaggaaaagaataccacgttctgctggaaagcgcgagaggcggagaatacagcatagccggactcgaccctgtcgcaatagcgaaagggaaagacggtatcacgacgattcaatataaaggggacgtcatattcaaagagggggatccgtttctgcagttttctcaatggtttgaaacgctgaaaacggagacagttgcagattttcccgactttcagggcggggctgtcggttttcttagctatgactatgcccggtatattgagaaattcaaaatcctgtctattgatgatctgcaaacgccggatttattctttctcgtatttgatgatatagccgtctatgaccatgagcagcagcagctttgggtgattacccacactgatgaagaaacgccggccgctgcggaagagaaattggacaggcttgagcaaatgtggaagacggaacatccgaaggccgctggaggtcatcagccgaatgataacaaaggcccggcattcgcggcctcatttacagaagccggcttttctcaggctgttgagaaagtgaagcaatacatcgcaagcggtgacgtatttcaggtgaatctttctgttcgccagtcggagcgcctttctgcgcctccttatgaggtgtataagatgttaagagaaatcaacccttcgccgtacatggcctacttggaaaccccggattttcaaatcatctgcgggtcgcctgaactgctcattaagaaaaagggcaccaggcttgaaacaaggccgattgccggaacgcgatcccgcggggcggatgaagcggaggatgaagcgctcgcgaacgaattgatcatgaatgaaaaagagcgcgccgaacatgtgatgctcgttgatttagagcgtaatgacctcggcagggtctccaagtacggttcggtccgggtcgatgaattcatggtgattgagaagtattcccacgtcatgcatattgtctcaaatgtgtgcggtgaactaagggatgaatgcgatgccgttgatgtcatccatgccgtgtttcccggaggtacgatcaccggagcgccgaaagtcagaacgatggaaattattgaggagcttgagccaacgagacgggggctttatactggttctatagggtggttcggatataatcaggatatgcactttaatatcgtcatccgaacgatttatgtgaaagcaggccaggcgttcatgcagtcgggagcgggaatcgtcatcgattcaaatcctaggcatgaatataaagagtcaattaaaaaggccctggcgatgaaaaaggcgctgcagttgagtgaagaagagaaaaaagagcagaggagagctgagatatgattctaatgatcgacaattacgattcgtttacgtacaacttggttcagtatttaggcgagcttggcgaggagttggtcgtcaagcggaacgatgagatcacccttcaggaaatagaggacatgtcgcctgactttttgatgatttctcccgggccttgcagtccggatgaggccgggatcagccttgaagcgatccgccattttgccgggaagataccgattttcggggtttgcctcggacaccagtcgatcgcccaggttttcggcggcgatgtcgtcagggcagagcggctaatgcatgggaaaacttccgagatttcgcacgacgggctgacggtttttaaaggcctggaacatccgctcacggccacgaggtatcattctttgatcgtcaaaccggatacactgcccgattgttttgagacatcggcttggacggaagaaggggagattatggccatcaggcataaagaactgccggttgaaggcgttcagttccatccagagtcgattatgaccgcttacggaaaagagatgctgaagaattttattgagacttaccgaaagaaagtgaacgcatgatcatttacctgaacggtcaatatgtaaaggaggaggaagcaagactttctccttttgaccatggttttttatacggagtcggggtattcgaaacgttccggctttatgaagggaagcccttccttttagactggcatatggacagattgaacaacgctttggaacagctgaaaattgagcttgagctgacaaaaagcgaagtgcttgtcattcttgacaggctgcttcagttgaatcagccgcagaatctggatgcaagggtccggctaaatatatccgccggtcccggcggccccggcctttttcctgattcatacaaaaatcccggcgtcatggtgatgatgaatccttttcagcctgcatccgttccggctgaaaaggagggcgtcatcttgcaggtctgccgcaatacgccagagggtccgttccgcttgaaatcgcatcactttttaaataatttgtacggaaaaagggagctcggacatggcgcggccaaagaagggatttttcttaccgaaggcggagctgtagctgaaggaattatttccaacgttttttggcggaaaggcagctgtgtgtatacaccttctcttgataccggcatattaggcggtgtcacacgccgctacgtcatcgagcgccttgcagatatgggaatcgaagtcatagagggggtataccccttggaagagcttctctttgcggacgaagcatggatgaccaattccgttcaggaaatcgttccattccggagaatcggcagcactgaatttccgggaaaggatggaaatttgtcgaaacgtctgcaagaggcatacactaatgataggaaagcagcaaaagaatatttgagttaaagggtgaaggatatggcgcttcaaacagcggtgcgttcaaagcaactgatcgcaaagcaatacacgttgtcttatgaagataaaacattgatcatgggaattttaaatgtgacgcccgattctttttcagacggcggaaaatataacagcatcgatcgcgccgtcattcatgcaaaacaaatgatcgaagacggcgcccatatccttgatatcggaggagaatcgacgaggccgggggcggaaaaggtttctcttgatgaagagctgtcaagagtcatacctgtaattgaaaaacttgttcaggaaatcgacgtcccgatttccgttgacacttataaagcgcaagtggcagatgaagccattaaggccggtgcagccatcatcaatgatgtctggggagcaaaagcagatcctgacatggcccgagttgcggccgctcataatgtgccgattatcttgatgcataaccgcgaggaacggaattataaggatttgatcccggacatgctgtctgatttgatggaatgtgtgagcattgcaaaatcagcaggcgttcaggatcatcacatcgtacttgatcccggcatcggctttgccaaaacgtatcatgacaatttggcggtcatgaatcagctcgagaagttcagcgaaccgggatacccggttttattggggacgtcacgaaaaaaatttatcggccgagtcctggatctgccgcctgaagaaagagcggaaggcacgggggcgacagtatgcctcggtattcaaaaggggtgcgatatcgtcagggtgcatgacgtcaagcaaatctccaggatggcaaaaatgatggatgccatgattgataaaggaggcgtttatcatcgataaagtgcatgtagagggcatggagttttacggatatcacggtgttttcaaagaagaaaacaaactcggccagagattccgcgttgatctgacagcatttctagatttaagcgaagccgggaaaacggataatattgaggccaccattaattatgcagagctgtataagctgtgcaaagaggttgtggagggagagccggtcaaccttgtggagaccctcgcggaaacgattgccgcacaagtgctggagaattttgaagcggttcaggaatgtacggttaaagtcgtcaagcctgatcctcctatacctggtcactataaatcggtggccatcgagatgacgagaaagcgaaaatgaacaacacggcatatatagcgctcggctcgaatatcggccggcgggaagaatatttaaaaaaagctgtctctctcctccatcaacatccgtctgtagaggtgacagacatctcgtcaatttacgaaactgatcctgtcggttatacagaccaagatctatttttaaacatggctgcagctgttaaaacatctctttcaccgtttgaattgctcgatttgactcagcgtattgaaaaagaactcggccgcaaacgcgacattagatgggggccgaggactgcagaccttgacattttgttgtataatcgtgaaaatattgagacagagcaacttatcgttcctcatcctagaatgcatgaacgtttgtttgtactcatcccgctgctggagatttatccggatcttgagggagctgtcaatcatgcaaaaaatcaagaaggtgtaagagtatggaagcagaaatctggggtagacgaattcgtgcatatcgaaagctgaagggttatactcaagaagggtttgccaaagcattgggtatatccgtttctgtgcttggtgaagtagaacgcgggaatcgtatgccgacggagagcatgctcagggatgtagccaatactttaaatataacagtggaggaactatctccatcagaagaataagaaaggaggactaaaaatgtttaaaatcggtgatatagaattaaaaaacagggttgtgctcgcgccgatggccggtgtctgcaactcagccttccgcttgacggttaaggaattcggagcgggtttggtctgcgccgaaatggtcagcgataaggcgatcctttacaataatgcgaaaacgatgggaatgctttatatcgatgaacgtgaaaaaccgctcagcctgcagatcttcggcggagaaaaagaaacgcttgtcgaagcggcgaagtttgttgaccaaaacacaactgcggatattattgatataaacatgggatgtccagtgccaaagatcacaaaatgtgatgcaggagccaaatggctgcttgatccgaataaaatttatgaaatggtttcagctgtcgtggaggctgttgacaagcctgtgaccgtgaaaatgagaatgggttgggacgaagaccatatctttgctgttgagaatgcgagagctgtagaacgagcaggcggaaaagcggtcgctcttcacggacggacccgcgtgcaaatgtacgaaggaacggcgaactgggatattatcaaagaagtgaagcagtccgtttcaatccctgtaatcggaaacggtgatgtcaaaactccgcaagatgcaaaacgcatgcttgatgaaacaggggtggacggcgtcatgatcggccgtgcagcgctgggtaacccgtggatgatttaccgtacggttcactatttggaaacaggcgaattgaaagatgagccgaaagtgcgtgagaaaatttctgtctgcaaacttcaccttgaccgattaatcgggctgaaaggcgaaaatgttgcggttcgcgaaatgagaaagcacgcagcctggtatctaaaaggcataagaggaaacgcaaaggtccggaatgaaatcaaccattgcgaaacgagagatgagctcgttcagcttttagacgcgtttacgattgaagccgaggcaaaagagcttcaggatgcaaaagtaggataaatccgacctctgctcactgccagttttcactggcagtttttctgcttttttcctgaaagactaaaagtaacggagtgatatatgatgagccatgaagagcataaccatgaagaattaaacgaccagctgcaagtcagacgcgataaaatgaatcagttgagagaaagcggaaaagatcctttcggacagcgttttgatcgcacccatcaatcaactgatctcattgagtcgtataatgaattctcaaaagaagaattagaggaaaaagcaattgaagtaacgattgccggccggatgatgacaaagcgcggaaaagggaaagcgggattcgcgcatattcaggatttaaagggccagattcagatctatgtcagaaaagacagtgtcggtgaagagcagtacgaatggtttaaaagctctgacctcggggacatcgtcggcgttacaggcgtcatgtttaaaacgaatgtaggcgaattgtctgtaaaagcaacatcttttgatttattgacaaaagcccttcgtccgcttccggacaaatatcatggattaaaggacatcgagcagcgctaccgtcagcgttatttggatttgatcgtaaatccggaaagcaaaaatacgtttattacacgaagcaaaatcattcaatccatgagaagatacttagatgaccacggatacttagaagttgaaacgcctacgatgcacgcgattccgggtggcgcatctgcccgtccgttcattacacatcataatgcgctggatatgccgctttacatgaggatcgctatcgagctccatttgaaaaggctgatcgtcggcgggttggaaaaagtctatgaaatcggacgtgtattccgaaatgaaggggtctccacacggcacaatcctgaatttacgatgatcgaactttacgaagcttatgctgactataaggatattatgagattgacggaaaatctcattgctcatattgcacaagaagtgctcggcactacgaccgttcaatatggagattatgaagtcgacctcaagcctgaatggaagagactccatatggtcgatgctgttaaagaagccaccggtgtagacttctggaaagaagtatcggtagaagaagcaagagcatatgccaaagaacacggaattgaaatttctgaaggcatgtcagttggacatatcattaatgaattcttcgagcaaaaagttgaagaaacgttgattcagcctacttttatatacggacaccctgtggagatttctcctctggctaagaaaaatcctgaagaccctcgatttacggaccgttttgagctgtttatcgtgggccgtgagcacgcgaatgcatttactgaattaaatgatcctatcgaccaaaaagaacgctttgaagcgcaattaaaagaacgtgaagaaggaaacgatgaagcgcatatgatggatgaagactttgtcgaagcgctggagtacggaatgcctcctaccggcggccttggaatcggcatcgacagactgattatgcttttgacgaattctccttcaatcagggacgttttactattcccgcaaatgagacatcgttagttgactttcgtgcagcagccgcgtaacaagcggctgctgctcatttaaaacaaattaaattttttctcaaaaaagtattgcacaatcataaatacggtggtatattattattcgttgccgcaaaacggcggcgaaagaaaaaaaagaacttcaaaaaaagttcttgacttaatatccgagattgaatataatataaaagtcgctttaacaatgatctttgaaaactaaacaagacaaaacgtacctgttaattcattaaataaatcgcacatttgagtgtgcgtagtcattatcaaacttcatggagagtttgatcctggctcaggacgaacgctggcggcgtgcctaatacatgcaagtcgagcggaccgacgggagcttgctcccttaggtcagcggcggacgggtgagtaacacgtgggtaacctgcctgtaagactgggataactccgggaaaccgggggctaataccggatgcttgattgaaccgcatggttcaatcataaaaggtggcttttagctaccacttacagatggacccgcggcgcattagctagttggtgaggtaacggctcaccaaggcgacgatgcgtagccgacctgagagggtgatcggccacactgggactgagacacggcccagactcctacgggaggcagcagtagggaatcttccgcaatggacgaaagtctgacggagcaacgccgcgtgagtgatgaaggttttcggatcgtaaaactctgttgttagggaagaacaagtaccgttcgaatagggcggcaccttgacggtacctaaccagaaagccacggctaactacgtgccagcagccgcggtaatacgtaggtggcaagcgttgtccggaattattgggcgtaaagcgcgcgcaggcggtttcttaagtctgatgtgaaagcccccggctcaaccggggagggtcattgggaactggggaacttgagtgcagaagaggagagtggaattccacgtgtagcggtgaaatgcgtagagatgtggaggaacaccagtggcgaaggcgactctctggtctgtaactgacgctgaggcgcgaaagcgtggggagcgaacaggattagataccctggtagtccacgccgtaaacgatgagtgctaagtgttagagggtttccgccctttagtgctgcagcaaacgcattaagcactccgcctggggagtacggtcgcaagactgaaactcaaaggaattgacgggggcccgcacaagcggtggagcatgtggtttaattcgaagcaacgcgaagaaccttaccaggtcttgacatcctctgacaaccctagagatagggcttccccttcgggggcagagtgacaggtggtgcatggttgtcgtcagctcgtgtcgtgagatgttgggttaagtcccgcaacgagcgcaacccttgatcttagttgccagcattcagttgggcactctaaggtgactgccggtgacaaaccggaggaaggtggggatgacgtcaaatcatcatgccccttatgacctgggctacacacgtgctacaatgggcagaacaaagggcagcgaagccgcgaggctaagccaatcccacaaatctgttctcagttcggatcgcagtctgcaactcgactgcgtgaagctggaatcgctagtaatcgcggatcagcatgccgcggtgaatacgttcccgggccttgtacacaccgcccgtcacaccacgagagtttgtaacacccgaagtcggtgaggtaaccttttggagccagccgccgaaggtgggacagatgattggggtgaagtcgtaacaaggtagccgtatcggaaggtgcggctggatcacctcctttctaaggatattatacggaatataagaccttgcggtcttatagacaggtgcgtttggatcttgtttagttttgaaggatcattccttcaaagcgtgttctttgaaaactagataacgaaagtagacattcacaagaattttctgtagtgattctttttaacggttaagttagaaagggcgcacggtggatgccttggcactaggagccgatgaaggacgggacgaacaccgatatgcttcggggagctgtaagcaagctttgatccggagatttccgaatggggaaacccactgctcgtaatggagcagtatccatatctgaattcataggatatgagaaggcagacccggggaactgaaacatctaagtacccggaggaagagaaagcaaatgcgattccctgagtagcggcgagcgaaacgggaacagcccaaaccaagaggcttgcctcttggggttgtaggacactctgtacggagttacaaaagaacgaggtagatgaagaggtctggaaaggcccgccataggaggtaacagccctgtagtcaaaacttcgttctctcctgagtggatcctgagtacggcggaacacgtgaaattccgtcggaatccgggaggaccatctcccaaggctaaatactccctagtgaccgatagtgaaccagtaccgtgagggaaaggtgaaaagcaccccggaaggggagtgaaagagatcctgaaaccgtgtgcctacaagtagtcaaagcccgttaacgggtgatggcgtgccttttgtagaatgaaccggcgagttacgatcccgtgcaaggttaagtttgaaaagacggagccgcagcgaaagcgagtctgaatagggcgcatgagtacgtggtcgtagacccgaaaccaggtgatctacccatgtccagggtgaagttcaggtaacactgaatgggaggcccgaacccacgcacgttgaaaagtgcggggatgaggtgtgggtaggggtgaaatgccaatcgaacctggagatagctggttctctccgaaatagctttagggctagcctcaaagtaagagtcttggaggtagagcaactgattggactaggggcccctaccgggttaccgaattcagtcaaactccgaatgccaaagacttatccttgggagtcagactgcgagtgataagatccgtactcgaaagggaaacagcccagaccgccagctaaggtcccaaagtatacgttaagtggaaaaggatgtggagttgcttagacaaccaggatgttggcttagaagcagccaccatttaaagagtgcgtaatagctcactggtcgagtgactctgcgccgaaaatgtaccggggctaaacgtatcaccgaagctgcggactgttcttgcgaacagtggtaggagagcgttctaagggctgtgaagcgagaccggaaggactcgtggagcgcttagaagtgagaatgccggtatgagtagcgaaagaggggtgagaatcccctccaccgaatgcctaaggtttcctgaggaaggctcgtccgctcagggttagtcgggacctaagccgaggccgaaaggcgtaggcgatggacaacaggttgatattcctgtaccacctcctcaccatttgagcaatggggggacgcaggaggatagggtaagcgcggtattggatatccgcgtccaagcagttaggctgggaaataggcaaatccgtttcccgtaaggctgagctgtgatggcgagcgaaatatagtagcgaagttcctgattccacactgccaagaaaagcctctagcgaggtgagaggtgcccgtaccgcaaaccgacacaggtaggcgaggagagaatcctaaggtgatcgagagaactctcgttaaggaactcggcaaaatgaccccgtaacttcgggagaaggggtgctctgttagggtgcaagcccgagagagccgcagtgaataggcccaggcgactgtttagcaaaaacacaggtctctgcgaagccgtaaggcgaagtataggggctgacgcctgcccggtgctggaaggttaagaggaacgcttagcgtaagcgaaggtgcgaattgaagccccagtaaacggcggccgtaactataacggtcctaaggtagcgaaattccttgtcgggtaagttccgacccgcacgaaaggcgcaacgatctgggcactgtctcaacgagagactcggtgaaattatagtacctgtgaagatgcaggttacccgcgacaggacggaaagaccccgtggagctttactgcagcctgatattgaatgttggtacagcttgtacaggataggtaggagccttggaaaccggagcgccagcttcggtggaggcatcggtgggatactaccctggctgtattgaccttctaacccgctgcccttatcgggcagggagacagtgtcaggtgggcagttttgactggggcggtcgcctcctaaaagtaacggaggcgcccaaaggttccctcagaatggttggaaatcattcgcagagtgtaaaggcacaagggagcttgactgcgagacctacaagtcgagcagggacgaaagtcgggcttagtgatccggtggttccgcatggaagggccatcgctcaacggataaaagctaccccggggataacaggcttatctcccccaagagtccacatcgacggggaggtttggcacctcgatgtcggctcatcgcatcctggggctgtagtcggtcccaagggttgggctgttcgcccattaaagcggtacgcgagctgggttcagaacgtcgtgagacagttcggtccctatccgtcgcgggcgcaggaaatttgagaggagctgtccttagtacgagaggaccgggatggacgcaccgctggtgtaccagttgttctgccaagggcatcgctgggtagctatgtgcggacgggataagtgctgaaagcatctaagcatgaagcccccctcaagatgagatttcccattcctataaggaagtaagatccctgaaagatgatcaggttgataggtctgaggtggaagtgtggcgacacatggagctgacagatactaatcgatcgaggacttaacctaaatatttgtgaatcgtctgtccgttatctagttttgagagaacacctctcagaaagccaaaggcaaggaaactcggctaaaggccctcacatcctgtgaggaacgcccagtaccttcgtcctgaaggcatagtttggtggcgatagcgaagaggtcacacccgttcccatgccgaacacggaagttaagctcttcagcgccgatggtagttgggggcttccccctgtgagagtaggacgccgccaagcgcttagaaagaccagcttatataaaagctggtcttttttcttttccctaaggttttatgacagctaaaagtggaaataataaaggacgaagagcaattagttgaaaaaaaaacgaaaaccacttatagtaaagttaaagtcaaatatagtcaaagtcaagtgaaggagggggctgagtggggaaaaatatttctgacataatcgaacagtatttgaaacaaatattagaacagaacgggaaagaaatattagagattaaacggagcgaaatagccgataaatttcagtgtgttccttctcagatcaattacgtaatcaatacgcgttttacgagcgagcgcggatatattgtcgaaagcaaaagaggcggcggcggttatatccgaattattaaaattaaaatgaacgacaaaattgatttgattaacaatattatgaatcaaatctatacaaggctctcccaggctgcttcagatgacatcattttaaggctgttagaaaatggtgtcattacagaaagcgaagcgaaattgatggtgagtgtcatggaccgttctgttttatatattgatttgcctgaacgagacgaattaagagcaagaatgatgaaagccatgcttacgtcacttaaatttaagtaaagcgggtgagaagcgtgatatgtcaagagtgtaaagaaagaccggcaacttttcactttacgaaagttattaatggtgaaaaaaaagaaatgcacatctgtgaacaatgtgcgaaagagaacagcgagtcatattctatgaatgaaagtggcggattttccatccataatttattatccggactgcttaattttgactcgtcttttacaaacagcagcgaggcgcagctttttcaacagccggatcaggttttgcgatgcaaaaaatgcaatatgacgttcccggaatttcgaaaaaccggccggtttggatgttcggaatgttataaaaccttccactcctatatcactccggttttaagaaaagttcacagcgggaacacggtccacgcgggtaaaataccaaagcggatcggcggtaatctgcatgtaagaagacaaattgaagcattaaaaaaagagctgaaagaattaattcagcaggaggaatttgaaaaagcagccaacatcagagatcagatcagatcgcttgaacaaaacctgaatgcaaacaaggaggaggaggactgatgtcactgcagcattttattcagaatgctttaagcaattggatgcggcaagaaggccctgagagtgacatcgtgcttagcagccggatccgtcttgcgcgaaatttggataaagtccgttttccaacgcttttttcaaatgaagaggcttcagcgattatagcattgtttgaagaacagttcacaggctatgaagtgcccggtatcgggaagtttgagcttgtgaaaatggatcaggtccagcctttggaaaaaagggttcttgtggaaaaacatctgatcagtccgcatttgacggaagcttcctttggcgcatgccttctttctgaaaatgaagaagtgagtattatgctgaatgaggaagatcatattcgcattcaatgtctatttccgggatttcagctgtcagaagcattgaaagcagcaaatcaggtggacgattggattgaagaccggatcgactacgctttttccgaacaaagaggctacttgaccagctgccctacaaatgtcggaacagggcttagagcttctgtcatgatgcaccttcctgctttagtgttaactaggcaaataaacagaattattccggcaattaatcaattagggcttgttgttagaggaatttacggtgaaggcagcgaagcattagggaatatctttcaaatttccaaccaaattaccctcggtaaatcggaacacgacattgtcgaagatctgaacagtgtcgttgcccagctgatcgaacaagagcgttcagcaagaaaggcgctttatcagacttcgcaaatcgaacttgaagaccgcgtctacagatcttacggcgtactgtccaattgccggatgatcgagtcgaaagaaacagcaagatgtctttcagacgttcgtcttggaattgacctggggataataaaaggtctttccagcaatatacttaatgagctgatgatcctgacacagcctggatttctccagcaatattccggaggagccttaaggccaaacgagagggacatcaggcgggctgctcttatcagggagcgcttgaaattagaaaacaacggcaatagacaggaggatgaaacgatatgatgtttggaagattcacagaaagagcacaaaaagtattggcgcttgctcaagaagaagctctgcgtctgggccataataacattggaacagaacatattctcctcggccttgtccgcgagggagaaggaattgctgcgaaagcgctgcaggcgttaggactcagccctgacaagattcaaaaagaagttgaaagcctcatcggccgcggacaagaaatgtcacaatcgatccattacacaccgagagccaagaaagtgaccgaattggcgatggatgaagcgagaaagcttggccactcctacgttggaactgaacacatcctccttggattaatccgcgaaggggaaggtgttgcggcaagggtgctgaataatttaggcgtcagcttaaacaaagcgagacagcaagtattgcagctgttgggcagcaatgagagcggaggcgttgcttcaggcgccaacagtagcgccaacacaccaactttagacagtcttgcccgggatctcacggcgattgcaaaagaagacagccttgatcccgtgatcggcagaagcaaagaaattcaacgcgtgattgaagtgttgagccgcagaacgaaaaataaccctgtgttaatcggggagcctggtgtcggtaagactgcgattgccgaaggcctggcccagcagatcatcaataacgaagtaccggagattttacgcgacaagcgcgtcatgacacttgatatgggaacggttgtcgccggcacgaaatatcgcggtgaatttgaagaccgcctgaaaaaagtgatggacgaaattcgtcaagcgggaaatatcatcctcttcatcgatgagctgcatactctcatcggagccggaggagcggaaggggccatcgatgcctccaatatccttaaaccgtcgctggcgcgcggagagctgcaatgcatcggggcgacaacccttgatgaataccgcaaatacattgaaaaagatgctgcactagaacggcgttttcagccgattcaggttgaccagccgtctcctgaagaaagcattcaaatattgaaagggctcagagaccgctatgaagcccatcaccgcgtatcgattacggatgaagcgatcgaagcggcagtaaagctgtcagaccgctacatttcggaccgttttctgcctgacaaggcgatcgacttaatcgatgaagccggctcaaaggttagactgcgttcattcacaacgcctcctaacttaaaagagcttgaacaaaagcttgatgaggtaaggaaagaaaaagatgccgctgttcaaagccaggaattcgaaaaagcagcgtctttacgtgatacggagcagcgcttgcgtgaacaggtcgaagaaaccaagaaaacctggaaagaaaagcaaggtcaagaaaattccgaagtgaccgtcgacgatattgcaatggttgtatcaagctggaccggagtgccggtttccaaaattgcgcagaccgaaacagacaaattgctgaacatggagagcattcttcattcccgcgttatcggccaggatgaggctgtcgttgcagttgcaaaagcagtcagacgcgcgcgtgccggcttaaaagatccaaaacgtcctatcggttcgtttattttccttggcccaacaggcgtagggaaaacggagcttgcccgtgcacttgccgagtccattttcggcgatgaagaagcaatgattcgcatcgatatgtccgagtacatggaaaaacattcaacatcaagactcgtcggttcacctcctggatatgtcggctatgatgaaggcggacagctcactgaaaaagtgagaagaaaaccgtattccgtcgtcttgcttgatgaaatcgagaaagctcacccagatgtcttcaatattttgctgcaggtgcttgaagacggccgcctgactgattcaaaagggcgcacggttgactttaggaatacgattttgatcatgacatcaaacgtcggtgcgagcgaactgagaagaaataaatacgtcgggtttaatgtgcaggatgaaacccagaattataaagatatgaaagacaaagtcatgggtgaactaaaacgcgcctttagacctgaatttatcaaccggattgatgagatcatcgtcttccactctttggagaaaaaacatttgaaagatattgtatccctcatgtcagaccaattgaccaagcgtctgaaagaacaggatctttcaattgagctgactgaagcggctaaagaaaaaatcgccgatgaaggcgtggatctcgaatacggagcgcgccctctcagaagagcaatccaaaaacacgtggaagaccggctgtcagaagagctcctaaaaggccatattcaaaaaggccagcatattgttttggatgtagaagacggagaatttgtcgtaaaaaccgaagctaaaacgaactaatatagagacaaaagaaagaggcatacgatgttcatcagtatgcctcactttcttataaagggagcgttttgaaaaatcaatggctaaaacaaagactaaattcatttgtcactcatgcggctacgaatccgccaagtggatggggaaatgccccggatgcggtgcatggaataccatggtggaagaaacgataaaaaaacccgccgccaacagaagaaccgctttttcacattccgttcaaacagtgcaaaagccttcacctctcacttcaattgaaacaacagaagagccgcgaattaaaacgaaacttggcgaattcaaccgcgtcttgggaaacggcatcgtcaaagggtcacttgttttaatcggaggcgaccccggcatcgggaaatcaaccttgctgcttcaagtatctgcccagctcgctgattcaaaagaaaatgtcctgtacatctcaggcgaagaatcggtcaagcagacaaagctgagagcagaccgtctaggtatcaacagtcccactcttcacgttttatctgaaaccgatatggagtatattacgtcttctatagaagagatgaacccatcattcgtagtggttgattcgattcaaaccgtttaccaaagtgatatcacatccgctccgggcagcgtctcccaggtcagggaatgcaccgctgagctgatgagaattgcaaaaacgaaagggattccaatatttatcgtcgggcatgtcacaaaagaaggttcgattgccggaccgagacttctggaacatatggtcgacaccgtcctttactttgaaggtgagcggcatcatacatttcggattttaagagccgtcaaaaaccggtttggatcaacgaatgaaatgggaatctttgaaatgagggaagagggcctgacagaggtgctgaatccgtcagaaatctttctcgaagagcgctcggcgggagcggccggatcgagtgtcgtggcctcaatggaaggcacgaggccagtcttagtagagattcaggcgctgatttcccccacgagctttgggaatccgcgccggatggcaaccgggattgatcataaccgcgtctcattgctaatggcagttttagaaaaaagggttggactgctgctgcaaaatcaagacgcctatttaaaagtcgccggaggcgtcaagctggacgagccagcgattgacctcgccgttgcagtgagcatcgcctcaagcttcagagacaccccgcctcatccgacggattgttttatcggagaagtcggattgacaggggaggtccgcagagtatcaaggatagaacagagggtgcaggaagcggcgaagcttggttttaaaagaatgattattccttctgcaaatgtagaaggatggacaaagccgaaaggaatcgaagtcgtcggcgttgaaaatgtagctgaggcccttcgagcttcattaggaggatcataatatatggacaaagacaaaaaaggagcgaaacaggatctttcagaaatattgcagtttgtcgcccccggcacgcctcttcgcgaaggaatcgaaaacgtccttcgggccaaaacaggcggattaatcgtggtcggcttcaacgataaagtgaaagaagtggttgacggagggttccacataaattcttctttctctccggctcatctgtacgagctggctaaaatggacggggcgatcattctcagcgattcagggcaaaaaattctatatgccaatacacagctcatgcctgaggcgacgattccctcctctgagacgggcatgagacacagaacagccgagcgtgtggccaagcagaccggctgtctgatcatcgcgatttctgaaagacggaatgtgattacgctctatcaggaaaatatgaaatatatactcaaagatatcggctttatcttaacaaaagccaatcaggcgattcagacgctcgaaaaatacaaactcattttggaccatgcgatttccaatttgaacgcgctggaatttgaagagcttgttacatttggggatgtcatctccgttctgcatcgatatgaaatggtgctcagaatcaaaaacgaaattaatatgtatattaaagagcttggaacagaaggccatctcatcagactccaggttagcgaactgatcaccgatatggagcaggaagcggcgctgttcgtcaaagattatgtgaaagaaaaaatcaaagacccgtttgttctgctgaaacagcttcaggatatgtcgagtttcgaattgctggatgatgcgattctccttaagcttttaggctattcagcaactacgaacatggaagaatacgtttttccgagaggctacaggcttctccacaaaattccccgcctcccgatgccgatcgtcgaaaatgttgtcgaagcattcggccatttaaagctcattatcgaagcggatgtaaaagatttggatgaagtggaaggaattggggctgttcgtgcccaaaagataaagaaagggttaaagagacttcaggagaaacattatactgacaggcagctgtgagaaaattttctagaagtgattaaaatttgcaatttatgggtatattattcttactttttgttttccctttttcacgtggaaacagctgcatttataaaaattaaaacgattattttaaaggaggtgaaggtatgttaaaacgaatagttcaagcgttctttgcgattttgggaggcgttatcggtatttttctcataccggaattgtttgtactgttaaatgtacaggacatacctttagtaacaaacccgtatgcgtccgcttgtttaggagctatcatcttttttcttctgggcatctggtgtgcggatcacgtcatcaactgggtgaaacagattgaggattccttgatcaaagcacctgtctcagacttgttgttcggctctttgggattaatcttcggacttatgctcgcttatcttatcgtcaacgtcattccgttaaaagacatcccttatcagttaatcagcacggtcattccgattgtgttggccgcatttctcggctatcttggattccgtgtgggtttcaagaaaaaggatgaaatgctgacactttttacatcgagaaagaaaaaaggttctgctgaggaagagcgtccggaagaagacaaaaagctgaaaattttagacacaagtgttattatagatgggagaattgctgatatttgtcagaccggatttcttgaaggcgtcattgtgattcctcagtttgtgcttgaggaactgcagcatatcgccgactcttcagacgtcctcaaacgaaacagagggcggagaggactggatattttaaaccgtatccagaaagagcttgatattaaagttgaaatttatgaaggcgattttgaagacatccaagaggtcgacagcaagctcgtcaaactggcgaagctgacctcgggcgttgtcgtcacaaacgatttcaatttgaacaaagtatgcgagctccaaaaggttgccgtattgaacatcaacgaccttgccaacgccgtcaagcctgtcgtgcttccgggagaagaaatgaaggtgcaggtcatcaaagacggaaaagaacataatcagggcgtggcttatctggacgacggcacgatgattgtcgttgaagaagggcgaaattatattggcaaacatatcgacgtgctcgtgaccagcgtgctgcagacagcggcaggcagaatgatattcgccaagccgaaactgctggaaaaggcgctttgaaaaagggagaaataaaatgaattatgaagtcgtcattcctgccgccggacaaggtaaacgaatgaatgccgggaaaaacaaactgtttatcgaggcgaaaggaatacctgtgattattcatacattaaaggtgtttgaaaaccatgatgcctgcaaaaggatcattcttgtcatcaatgaacaggaattcggtgaattcaacacccttttaaaaacctatcattttaagactccgatcgagatggtgccgggcggaagagaacgccagcaaagcgtttttgcgggcattaaagcggccggcaaagaggaaacggtcctcgtccatgacggagcaagaccttttattaaacgggaatatatcgaacagcttgtcgagaaagcaaaggaaacaggggcagccatcgttgccgttcctgttaaagacacgatcaaacgcgttcaagacggtgagatagccggaacgattgaacgttcaagcttgtgggccgctcaaaccccacaagcttttcgtctttctattctgatgaatgctcaccttgaggctgaagcaaaaggtttcctcggtacggacgacgccagtcttgtcgaggaagccggaggtacggttgcaatcattcaaggggattatcaaaacatcaaactgacgaccccggatgacttgcttgtcgcagaagcgatattagaagcggaaaagaggaatgaacatgtttagaataggccaaggatttgacgtccatcaactagtggaaggcaggccgctcataatcgggggaattacgattccttacgaaaaaggccttctcggacattcagatgcagatgtgcttttgcacacgattgcggatgcatgtctcggtgccgtcggcgagggcgatatcggaaaacactttccggataccgatcctgaattcaaagatgccgactccttcaaactccttcgccacgtctggatgatcgtgaaggaaaaaggctatacgctagggaacctggattgtacaatcatcgcccaaaagcctaaaatggcgccgtatatcgaagacatgagagccagaattgccgaagggctagaggcggaaatttcccaaattaacgtaaaagcgaccacaaccgaaaagctcggatttacgggaagagccgaaggaatcgccgcccaggcttccgttctgctccaaaaggtataattcattttgaagacaggttcatttgatgatagaataggaaataaatttgaactctgctagagacgaaaggaagttagacagatgggaaacgaagttcgggttcgttatgcgccgagcccaacaggccatttacatatcggaaatgccagaaccgctctttttaattatttgtttgcccggagccaaggcggaaaattcatcatccgcattgaagatacggaccgcaagcgcaacattgaaggcggggagcaaagccagctgaactatttaaaatggctgggcatcgactgggatgaaagcgtggatgtcggaggagaatacggaccataccgccaatccgaaagaaacgacatttacaaaacatattacgaggagcttcttgaaaaagggctagcctacaaatgctactgcacggaagaagagcttgagaaagagcgtgaggaacaggctgcccgcggagaaatgccgcgctactccggcaagtgccgcaatttaacaaaagaagagcaggaaaagctcgaagctgaaggaagacagccgagcatccgctttaaagtgcctcaaggtgaagtcatccgctttgatgacatcgtcaaaggagaaatttcttttgaaacagacggaatcggcgacttcgtcatcgtgaagaaagacggaacgcctacttacaactttgccgtagcggtcgatgactatttaatgaaaatgacgcatgtcctgcgcggcgaagaccacatttccaatacgccaaagcagatcatgatttacaacgcccttggctgggatatcccggcatttggacatatgacattaatcgtcaatgaaagccgcaaaaaactgagcaaacgtgatgagtccatcattcagtttatcgagcagtacgaagagctcggctatttgccggaagcattgtttaacttcatcactcttctaggctggtcgccggtcggagaagaagaactgtttacaaaagaacagtttattgagatatttgatgtaaaccgtttgtcaaaatcaccagcggtgtttgatacgcataaactgaaatgggtcaacaaccagtatgtgaaaaaacttgatcttgatcaggtcatcgaattgaccgtgccgcatttgcaaaaagcgggcaaggtttcagaagagctttcaggcagcgaacaggaatgggtgcgcaagctgatttccctatatcaggaacagctgagctacggcgctgaaatcgtcgagttaacagagttgttctttaaagacgatatccagtataatcgtgaagcaagaacagttttagaagaagagcaggttccggaagtgcttcgcgtatttgccgaaaagcttgagcagcttgactcgtttacggcagatgagatcaaggcatccatcaaagccgttcaaaaagaaacaggacataaagggaaaaagctgtttatgccgatccgcgtagcgacgacaggccagacccacggtcctgaactgcctcagtccattgaattattggggaaagacaccgttttaaaacggctgcataacattattcaataagataaatcgttgacagggataagtataaagccagggcctttaaagagagagtcttcatcggctggaaaagacttaagcgccgggctttagaaatgcacctcttgagacctttgaagaacgtttttataacaagtattcaaaggcggtatccgccgttatggatgagagttgagaaaacagctgtgctgttttctaaacagagtggaaccgcgcgtcaaaaagcgtctctgtcatcagacagaggcgttttttatatggtttgacaatagagacaaaggaagcggggaacggggggaatcatgtgttctttaaaatgctgaaagaagatgtagatgtcgtatttgaccaagatccggctgcgagaagctacattgaagtcatcttaacttattcaggtttgcatgctatatgggcacatcgaattgcacatgctttatataaaagaaaaaggtttttcatcgccagagcgatctctcaaatcgcccgcttctttacgggaatcgaaattcacccgggtgccaagatcggcaggagatttttcattgatcacggcatgggggttgtgatcggcgaaacctgtgagatcggaaacaatgtcacggtttttcagggcgtgacgcttgggggaacaggaaaagaaaaaggcaaaaggcatccgacaatcgaggacgatgccctgatctcaacaggggccaaagtgcttggatccattacagtcggaagaggggcgaaaatcggtgcaggctccgtcgtcctgcacgatgtgcctgaatgctccaccgttgtcggcatcccgggccgggtcgtcgtacaaaacggaaagaaaatcagacgcgacttgaatcaccaggatttgccggatccggtggctgaccgcttcagagaattggaaaacgaaatcaggcagctgaaacaagagctccggagaaaagaaagggaagatgagctgtgacactaacattgtataatactctcacacgaaaaaaagagccgtttgtgcctcttgaagaaggcaaggtcaaaatgtatgtgtgcggtccgacagtatataactacatccatatcggaaacgcaaggccgcctatcgtgtttgacactgtcagaaagtatttagagtataaaggctatgaagtccaatatgtctccaattttacagatgtcgatgacaaattaattaaagcggcaaatgaacttggagaggaagtgccggtcatcgccgaacgctttattaaggcatacttcgaagatgtcggttcactgggctgcacaaaagctgactgccatccgcgcgtcactgaaaacatggatgagatcatcgactttattcagacgctgatcgataagggctatgcctatgaggcggacggagatgtttattataaaacaagatcgtttgaaggctatggaaagctgtcgcatcaatcggtcgatgagctgagatcaggcgcccgaattcaagtgggcgaaaagaaagaagatgcgctcgattttacactatggaaagcggctaaagataacgaaatctcctgggatagcccttggggaaaaggccgtcccggctggcatatcgagtgctctgcgatggcgagaaaatatctgggcgattcgatcgacattcacgccggcggtcaggatctggccttcccgcatcatgaaaacgaaattgcccaatcggaagcattaacagggaagcctttcgcgaaatattggcttcataacggctacattaatatcgataatgagaaaatgtcaaaatcgctcggcaactttgttcttgtgcatgacattattaaagagcatgacccccaagtgctgcggtttttcatgctgtctgttcattacagacatccgataaactattcggtcgaacttctcgagaacacaaaaaacgcttttggacgtctaaaaacagcttatagcaatttgcagcatcgcctaaaaagcagtacaaatttaacagagggcgattcagaatggcttgaaaaaatcgaagagcagcgaaaagccttccaaacggctatggatgatgatttcaatacagcgaatgccatttccgtcctgtttgacctggccaaacatgccaactactatttgcaggaaaagaatactgcagaacacgtcattcaggcgtttatacagctgtttgacgagatctgctcagtgctcggcttctccctcaaggaacaggaacttttggataaagacattgaagaactgatcgagaagcggaatgaggcccggagaaaccgcgactttgcaacatctgatcagattcgcgaccagttgaaaagcatgaatattatcttggaggacactccgcagggcacgcgctggaaaagaggagaatcataaacatgaatttggaaaccattaaagacgccaaacagctgaatggtttggcgcttgcttacatgggtgatgccgttttggaggtatatgtgaggcatcacctcttaaagcaaggcatgacaaggcccaatgatctgcaccggcagtcgaggcgatatgtctccgccaagtcgcaggcaagcatgctgtttgcgcttgaggagcaggaatttttcaccgaggaagaacaggctgtgctgagaagagggcggaatgccaaatccggaacggtaccgaaaaacacggatgtccaaacatatcgttacagtacggcttttgaggcggtcatcgggtatctttttcttgagaacagggaagataggcttaatgaactcatcaaagcagcgctggaaaaacgggatggcagggaggaagtaaaatgagtcagcagcatgattacgtcataggaaaaaacgcggtcatcgaaatattaaagtccggccgggaattgtataagctgtggatggcggaaaacacagtgaagggacaggctcagcaagtcgtcgatctcgccgccaaaaaaggcgtcacgattcattatgtcccaagaaaaaaactcgatcaaatggtttccggacagcatcaaggcgtcgtcgcccaggtagcggcttacgagtatgccgagctggatgatctttttcaaaaggccgaagacagaaatgaacagccgtttatccttgtattagacgaaattgaggatccgcacaacctgggctctattatgcgcaccgcagacgcggtcggggctcacggcatcgtcattccgaaaaggcgcgcggtcggccttacaacgactgtcgccaaagcctcgacaggagccatcgaacatattccggtcgtcaaggtgaccaatctgtcgcggaccctggaagaaatgaagggacggggcatttgggtcgtcggtaccgatgcgtctggacaacaggactacaggtcgctggacggaaatatgccgcttgcgcttgtcatcggcagcgaaggaaaaggcatgggaaggcttgttaaagagaaatgtgattttctcattcgcctgccgatggcgggaaaggtcacatccctgaacgcctcagttgcagccggcctgctgatgtatgaagtgtaccggaaacgaagccctctgggagaatagacggaatggacatcctgttggtcgacggttataacatgattggggcttggcctcagctgaaagatttaaaagaaaacagttttgaagaagcaagggacctgttgattcagaagatggcggaatatcaatcgtatacagggtttcgggtaatcgttgtctttgatgcgcatctcgttaaaggaatcgagaaaaagaaggtcaatcatcgcgtagaagtgatattcacaagggaaaatgaaacggctgatgaacggatcgagaaactggtgtcagacttgaatagtattcagacgcagatccatgttgccacatccgattacacagagcagtgggcgatttttggccagggggccctgcgcaaatcggccagagagctgctcagggaggtcgaagcgatcgaaaggcaaattgaaaacagggtgaaacaaatcacctcagagcgtcccgcagggaaaattccattgtcagaagacgtcttgaggatcttcgaaaaatggcggcgtggcgacttggattaggttgacgcttttttgtccattactgtataatatttctatctacgtgcggtcggggggatcggagtgaacttacaaaacaaccagggaaaattcagcaaagaacagttcagcaaagaacgtttttgccagttggaagacgagcaggtcattgaaatggttcatgtcggagacagtgatgcgttagattacttgattacaaagtaccgtaattttgtaagggcaaaagcaagatcctacttcttaatcggggctgatcgggaagatatcgttcaggaaggcatgattggactctacaaatctatccgtgattttagagaggacaagctgacttcattcaaagcttttgcagaattatgcattacccgccaaattattaccgctatcaaaacagctactcgccagaaacatattccgctcaattcttatgtgtcgctggacaagcccatttatgacgaggaatcagaccggacgcttctcgacgtgatttcaggggccaaggtcatgaatcctgaagagctgatcatcaatcaggaagaattcgatgatatcgagctgaaaatgggagaattgcttagtgatttagaaagaaaagttcttgcgctctatctcgacggaagatcctatcaggaaatatccgaagaattaaaccgccatgtaaaatcgatcgataatgcgctccagcgtgtcaaaaggaagcttgaaaagtacctggagctccgcgaaatcagcttgtagccgatgcttatggcatattgacagtcattttatgactgtgatatgttacttaggaaatgaacgtccagaaaaaggtgtaaacatgaagaaaaaagtaacgttagcctgcaaaaattgcggaaatcgtaattatacgacaatgaaaagctccgcagctttggctgaacggctcgaagtaaagaaatactgcaataactgcaattcacatacagtacatctggaaacaaaataggtgtttttgtttttaggttgtggaggtttcttaccatgggtattatcaaatttttaaagaatgtcggaaaagaaatgaaaaaggtcacctggcctaaaggaaaagaactaacgcgctatacgatcactgttatcaccaccgttatctttttcgccatcttttttgcactcatcgattcgggtattacgcaattaattcgtttaatagttgaataatgatcagcataacgtgttataatagatctaaatatgacttgccaaaaaacccgttcaacgggttttttcattgtttcaaaatatgaggctcgtataaaagaaagtgtcagtttcccggtacggccaataaacttttaaggtgtggggagggaaggactgaaagggtcctgaatgagaatggaaaagaaatggtatgtggttcatacgtactccggctatgaaaataaagtaaaggcgaatttggaaaagcgggtagaatcgatggggatgcaagataagatattccgcgtcgttgtacctgaagaggaagaaaccgatattaaaaacggcaagaaaaaagtcgttaaaaagaaagtcttccctggttatgtacttgtcgaacttgtcatgacggatgattcctggtatgttgttcgaaatacgcctggtgtgaccgggtttgtcggttcagccggatcaggttcaaagccgactgcactgcttccgggcgaagcggaaaaaatcctgaagcggatggggcttgaagaaagaaaaacagaaatcgactttgaattaaaagaaaccgtcaaggttatcgacggcccgtttgctgatttcacagggacgatcgaagagatcgaccacgacaaaaataaagtcaaagtttttgttaatatgttcggaagagagaccccggttgagctcgaatttactcaagttgacaaattgtaatggaaaagcgcttgaaatcactatataaaagtggtaatatacaaaggtgcgtcttggcaaaaaggtcaaggcagctagcttgatattttcatcattcatataaagaatgagaccttgagtgggagggttcaccctattaccacatcacggacttaaggaggtgtgtctcgtggctaaaaaagtagttaaagttgtaaaattgcaaattcctgctggaaaagcgaatccagctccgccagttggtcctgcgttaggtcaagccggtgttaacatcatgggattctgtaaggagtttaacgctcgtacatctgaccaagctggtctgatcattcctgtagaaatttcggtttacgaagaccgttcatttacatttatcacaaaaactccgcctgctgctgtattgcttaaaaaagcggctggaattgagtcaggttctggtgagcctaaccgtaataaagtcgcaaccgttaaacgcgataaagtacgtgaaatcgccgaaacaaaaatgcctgacttaaatgcggcagatgttgaagcggctatgcgtatggttgaaggaactgcccgcagtatgggtattgtgatcgaagactaatttttgtctctttgctgggttgcgagtttggatcagacaagttcgcaacccttattcgtgggaggttattccgctaaaaccactaaggaggaaattttaaaatggctaaaaaaggtaaaaaatacgtcgaagctgccaagcttgtagatcgtacaaaagcttacgacgtaaacgaagcgattgagcttgtgaaaaaaacaaacacagctaaattcgatgctactgttgaagcggcatttcgtttaggtgttgaccctcgtaaaaacgaccagcaaatccgcggtgcagttgtacttccaaacggaacaggcaaaactcagcgcgttcttgttttcgctaaaggtgaaaaagcgaaagaagcagaagctgctggtgcagactacgtaggcgatgcagattacatcaacaaaattcagcaaggctggtttgattttgatgtgatcgttgcgactcctgacatgatgggtgaagtcggtaaaatcggacgcgtgcttggaccaaaaggtcttatgccaaaccctaaaacaggaacggttacatttgaagttgaaaaagcagtcaacgaaatcaaagcgggtaaagttgaataccgcgttgataaagcaggaaacatccacgttccaatcggaaaagtgtctttcgaagaaggcaagcttgtagagaacttcgcgacaatgtacgacacaattttgaaagcgaagcctgctgctgctaaaggtgtatacgtgaaaaacgtttctgttacatctacaatgggacctggaatcaaagtggacccttcaactttcaacgtaaaataatattgacttttgataagacgttctgatataattcaaaacgttgtaaaaataaaatatgtccatttataccgtagacagtaggtgctgataaggcttaatttcctaccgaggtgtatatatatcacagctctagcgttacgtatgcttgtatatacagcctccatgtcgaatggaggctttttatatggaacatgtcgttaaagaacgtgatcaccgaacggtataagtgttacacagatgaatcttacaggaggtgtaaccatgagcagcgcaattgaaacaaaaaaagttgttgttgaagaaattacttctaaactgaaagaaagtaaatcaacgatcatcgttgactatcgcggccttaacgtagctgaagtaacagaacttcgtaaacagcttcgcgaagctaacgttgagttcaaagtgtacaaaaacacgatgactcgccgtgcggttgaacaagctgaacttgatggtttgaacgatttcttaacaggaccgaatgcgattgcattcagcactgaagatgttgtcgctccagctaaagttcttaacgagtttgctaaaaagcacgaagctcttgaaatcaaagcgggcgtaatcgaaggcaaagtgtccacagttgaagaagtgaaagctcttgctgaacttccatctcgcgaaggcttgctttctatgttgcttagcgtacttcaagctccagttcgcaatcttgctcttgcaactaaagctgttgcagaacaaaaggaagaacaaggcgcttaatagcatcagtatctaaaaaataaaacaaaatggaggaattacaaatggctttaaatatcgaagaaatcattgcttccgttaaagaagcaactgtacttgaactgaacgacttagtaaaagcaatcgaagaagaattcggcgtaactgctgctgctcctgtagctgtagctggcggagctgctgcaggcggtgctgctgaagaaaaaactgaatttgatcttgttcttgctggtgcaggagatcaaaaaatcaaagttatcaaagttgttcgtgaaatcactggtcttggcttgaaagaagctaaagaacttgttgacaacactccaaaacctcttaaagaaggtattgcgaaagaagaagctgaagagcttaaagctaaacttgaagaagttggcgcttctgtagaagttaagtaatcttcacctaatctttaggggaaagctcgcttttaaaagcgggctttttctttgctaattaattgtagtcccttccgcataagataagccatcttgtttcaagatatctggagagttcaccaactgaggaggttctgtgatgactgaccattattattcggaaaaaccttcagcaaaaagcagcagatcaatgtgggcatttcgcttgagaaaccggacgtttacttttatcagcgacagcggagttttttcaaaaagagaagtggactttggctcaaggctgctgattgaagctttccgggaaccggatgcagaaggtgattttttggatgtaggctgcggctatggcccgattggtctttcgcttgctgcggatttcgaagatcgaatggttcacatgatcgatgttaatgaaagagctgtcgaactttcgaaggaaaacgcgttaaataatcagatcgacaacataaagatctaccagagtgatctgtttgccaacgtcgaacctgcaaaaaaattcgcttctattattactaatccccccatacgcgccgggaaaaaaactgtgcacgccatctttgaaaaaagcgctgaacatttgcggccttcaggagagctgtgggtcgtcattcagaaaaaacaaggcgggccttctgcctttgaaaaattaaaagaactttttgcggacgttgaagtcgttcaaaaaaagaaagggtactatatcatcaaagcaaaaaaagtttgactcggattttcagctatgttaacattataaaatgccaatgtatatattttgctgccgtttttaagaaacgcctaggtttgtataaaatatacattattgggaacactaataaaatcggtattttgtttttggatgtggttttctaaattagaaacccttttttcttttgtcttgtaaaagtatttcttacatatttgaggaagaaatgcttgttacacatatattacgcatgatttgaggggtgaatagttgacaggtcaactagttcagtatggacgacaccgccagcgcagaagctatgcacgcattagcgaagtgttagaattaccaaatctcattgaaattcaaacctcttcttatcagtggtttcttgatgagggtcttagagagatgtttcaagacatatcgccaattgaggatttcactggtaacctctctctggaatttatcgactacagcttgggcgagcctaagtatccggtagaagaatcaaaagagcgggatgtgacctattcagctccgctgcgggttaaagtccgcttaatcaacaaagaaaccggcgaagtaaaggatcaggatgtcttcatgggcgatttccctattatgacagacactggaaccttcattatcaacggtgcagaacgggtcatcgtatctcagctcgttcgttctccaagtgtatattttagtggtaaagtagacaaaaacggtaagaaaggttttaccgcgactgtcattccaaaccgtggcgcatggttagaatacgagactgatgcgaaagatgttgtttacgtacgcatcgatcgcacacgtaagttgccggttacggttcttttgcgtgctcttggcttcggatctgaccaagagatcattgatctcatcggtgaaaacgagtatctgcgcaatacgcttgataaagataatacggaaaacaccgataaagcgcttcttgaaatctacgagcgtcttcgtccaggggagccgcctaccgtagaaaacgcaaaaagcctgcttgattcaaggttctttgatccgaaaagatatgaccttgcgagtgtaggacgttataaaattaataaaaagcttcacatcaaaaaccgactttttaatcagcggcttgctgaaacgctagtcgaccctgaaacaggcgaaatccttgccgaaaaaggagcgattttagacagaagaacgcttgataaagttctgccgtaccttgaaaacggaatcggttttaaaaagctttatccgaacggcggagttgtcgaagacgaagtaacgcttcagtctatcaaaatctatgctccgacagaccaagaaggggagcagacaatcaatgtgattggaaatgcttatatcgaagaaggcgttaagaatattacaccttctgatattatcgcttccatcagctatttctttaacctgcttcacggagtgggcgataccgacgatatcgaccatctaggaaaccgccgtctccgttcagtgggagagcttctgcaaaaccaattccgtattggtttaagcagaatggagcgcgttgttcgtgaaagaatgtctattcaagatacaaacacgatcacgccgcagcagctgatcaatattcgccctgtcattgcatcaatcaaagagtttttcggaagctcgcagctttctcagtttatggatcagacgaatccgcttgctgagctgacgcataagcgccgtctgtcagcgctcggaccgggcggtttgactcgtgagcgcgccggaatggaagtccgtgacgttcactattcacactacggccggatgtgtccgattgaaacccctgagggtccaaacatcggcttgatcaactcgctttcttcattcgcgaaagtgaaccgtttcggcttcatcgaaacgccgtatcgccgcgtcgatcctgaaactggaaaagtaacgccgagaatcgattacttgacagctgatgaagaagacaactatgtcgttgcccaggcaaacgcacgcctgaatgatgacggttcttttgtggatgacagcatcgtcgcccgtttcagaggggagaacaccgttgttccgaaagaccgcgtcgactatatggacgtttcgcctaaacaggttgtctctgccgcgactgcatgtattcctttcttggaaaacgatgactcaaaccgcgcccttatgggagcgaacatgcaacgtcaggccgtacctcttatgcagcctgaatcgccgatcgtcggaaccgggatggaatatgtatctgcgaaagactccggtgccgctgttatttgccgccaccctggaatcgttgaacgggtggaagcgaagaacatctgggtgcgccgctatgaagaagtcgacggccagaaagtcaaagggaaccttgataaatacagcctgctgaagtttgtccgttccaaccagggaacttgctacaaccagcgtccgatcgtaagcgtcggtgatgaggttgaaaaaggtgaaattttagctgacggtccgtccatggaaaaaggtgagcttgcccttggacgcaacgtcatggtcggctttatgacatgggatggctacaactatgaggatgccatcatcatgagcgaacgccttgtaaaagacgacgtatacacgtctattcatattgaagaatacgaatcagaggcccgggatacaaaactcggacctgaagaaatcactcgcgatattccgaacgtcggtgaggacgctcttcgcaatctcgatgaacgcggaattatccgtgtcggtgctgaagtaaaagacggagatcttcttgttggtaaagtaacccctaaaggtgttacagagcttacggcggaagaacgcctgcttcatgccatcttcggggaaaaagcgcgtgaagtgcgtgatacgtcgctgcgtgtacctcacggaggcggcggtatcatccttgatgtaaaagtgttcaaccgcgaagacggagacgaactgcctccgggcgttaaccagctcgtccgcgtctacatcgttcagaagcgtaaaatttctgaaggggacaaaatggccggacgccacggtaacaaaggtgttatttcgaaaattcttccggaggaagatatgccgtatctgcctgacggaacgccgattgacatcatgttaaacccgctgggcgtaccatcgcgtatgaacatcgggcaggtgttggagctgcaccttggtatggctgcacgccgcctcggtctgcatgtcgcgtcacctgtatttgacggtgcccgcgaagaagatgtgtgggaaacccttgaagaagccggcatgtcaagagacgcaaaaaccgtcctttacgacggccgaactggggagccgtttgacaaccgggtttctgtcggcatcatgtacatgatcaaactggcacacatggttgacgacaaattgcacgcacgttcaaccggtccttactcactcgttacccagcagcctctcggaggtaaagcgcagttcggcggacagcgttttggagagatggaagtttgggcgcttgaagcttatggtgcagcatatacgctacaagagatcctgactgttaaatcggatgatgtcgtaggccgtgtgaaaacatatgaagccatcgtaaaaggcgacaatgttccagaacctggtgttccggaatcgttcaaagtattgatcaaagagcttcaaagcttaggtatggacgtcaaaattctatcaagcgacgaagaagaaatcgaaatgagagacttggaagacgacgaagacgcgaaacaaaacgaagggctttctctgccgaatgatgaagagtccgaagagttggtttctgctgacgcagaacgcgatgtcgttacaaaagaataaacgaattttatacgcaagtgacagggtataacccgaagataaaaagggaggtaggccccttgctggatgtgaacaattttgagtatatgaacatcggtctcgcttcacctgacaaaatccgttcatggtcttacggagaagtgaaaaagcctgaaacaatcaactatcgtactttgaaacctgaaaaagatggtctattctgcgagcgcattttcggtcctcaaaaggactgggaatgccactgcggaaagtacaagcgggttcgttataaaggcgtagtctgcgaccgttgtggagttgaagtaacccgggctaaagtccgtcgtgagagaatggggcatatcgagctggcagccccggtttctcacatctggtattttaaaggaattccgagccgtatgggtcttgtgctggatatgtctccgcgcgcattggaagaagtcatttactttgcttcttacgtcgtaacagatccggccaatacaccgctcgagaaaaaacagcttctttctgaaaaagagtatcgggcgtacctcgataaatacggaaataaattccaagcgtcaatgggtgctgaagcgattcataagctccttcaagatatcgacctcgataaagaagtggatatgctgaaagaagagcttaaaacgtcacaaggacagcgccgcacacgtgcgatcaaacgtctggaagtattggaagccttccgcaattccggaaataagccgtcatggatgatcctcgacgttcttccggtcattccgcctgagctgcgaccaatggtacagcttgacggtggacgttttgcaacttccgatctgaacgatttgtatcgccgcgtaatcaaccgtaacaatcgtttaaaacgtcttctggaccttggagcgccaagcattatcgttcaaaacgaaaagcgcatgcttcaggaagccgtggacgcattgatcgataacggacgcagaggacgtcctgttacaggtccaggaaacagaccgttaaaatccctttctcacatgctgaaaggtaaacaaggccgtttccgtcaaaaccttctcggtaaacgtgttgactactcaggacgttcggttatcgtcgtaggtccgaacctgaaaatgtatcaatgcggtcttccgaaagaaatggcgctggaactgttcaagccattcgtcatgaaagagcttgttgaaaagggccttgcccacaatattaagagcgcgaagcgtaaaattgagcgcgttcagccggaagtctgggatgtccttgaatcagttatcaaagaacaccctgtgcttctcaaccgtgcacctacgcttcacagattaggtattcaagcgtttgaaccaacgcttgttgaaggccgtgccatccgtcttcatccgcttgtatgtacggcatacaacgctgactttgacggtgaccaaatggcggttcacgttcctttatcagcagaagcgcaagctgaggcgcgcatccttatgcttgctgcgcaaaacatcctgaaccctaaagacggaaaaccggttgttacaccgtctcaggatatggtacttggaaactactatctgacgctagaacgccctggtgcagtcggcgaaggtatgattttcaaagatacggatgaagcgttgcttgcttaccaaaacggatatgttcatttgcatacgagagtagccgtcgcggttaactcattgaaaaatgaaacgtttaccgaagaacagcgttccaagctgctcattacaactgtcggaaaactgatcttcaacgaaattcttccgccgtcgttcccatacatgaacgaaccgacgaagagcaacattgaagaaaaaacgcctgaccgtttcttcttggattacggtgcagatgttaaagaagccattaagaaccaagaaatcaacccgccgttcaaaaaaggcattttgggtaaaatcattgcggagatcttcaaaaggttccatattacagaaacatcaaaaatgcttgaccgcatgaaaaacctcggctttaaatactctacaaaagccggaattacggtcggtgtttccgatatcgtcgtattggacgacaaacaggaaatccttgaagaagcgcaaggaaaagtcgataacgtgatgaagcagttcagacgcggtctgattactgaagaagagcgttatgaacgggtcatttccatctggagtgcagctaaggatacgatccaaggcaagctgatgaaatccttggatgaaatcaacccgatctacatgatgagtgattccggagcccggggtaacgcatcaaactttacgcagcttgcgggtatgcgcggtctgatggccaacccggccggacggatcatcgaacttccgatcaagtcaagtttccgtgaaggtttaacggtactcgagtactttatctctactcacggtgcgcgtaaaggtcttgcggatacggcccttaagacagccgactcaggttacctgacacgccgtctcgtagacgtagcccaagacgtcatcattcgtgagactgactgcggcacagaccgaggcattcttgccaaagccatcacggaaggcacagaagtgatcgagcgtcttgaagagcgtcttgtcggccgattcgcgagaaagcctgttaaacatccggaaacaggtgaagtgctcgtgaatgaaaacgagctgatcgacgaagataaagcgattgaaattgtcgaagcaggcattgaagaagtgtggatccgctccgcatttacatgtaatacgtcacatggtgtatgtaaacgatgctacggccgcaacctggcaacaggaaccgatgtcgaagtcggagaagcagtcggaatcatcgctgcccagtccattggtgagccgggtacacagttaacgatgcgtaccttccatacgggcggggttgccggagacgatattacacaaggtttgccgcgtatccaggaattgtttgaagcgcgaaaccctaaaggtcaagcgacgatctctgaaattgacggtgtcgtggccgaaatcaatgaggttcgcgataaacagcaggaaatcgtcgttcagggcgaagtcgaaagccgttcatatacggcgccttacaacgcgcgcttgaaagtcactgaaggagagaagatttctcgtggtcaagtgctgacagaaggttcggttgatccgaaagagcttctgaaagtcactgacatcaccacggtccaagaatacctgcttcatgaagtgcagaaggtttatcgtatgcagggagttgaaatcggagataagcacgtcgaggttatggttcgccagatgcttcgcaaagtgcgcgtcatcgatgccggcgacacggaagtgctgccaggcacgctgctcgatattcaccagtttacagaagcaaacaaaaaagttctgcttgaaggcaaacgccctgcaactggccgtccggtgcttctcggtatcaccaaagcatcgcttgaaacggattccttcctgtctgccgcgtcattccaggaaacaacacgtgtcctgacagatgcagcgatcaaaggaaaacgtgacgagcttctcggcctgaaagagaatgttatcatcggtaagcttgttcctgctggaacgggtatgctgaactatcgtaaagtgaagccggtattgcaagtccaatcatctgatgaaatggttccggctgaataaataaaaaatcctaaagaaggatgtcactaaaaattgtcatcatatgttgacatccttctttcaggatgataatataaccaaggtgctcaatttaaacctgttactttggaggatatatgatgtcttatgataaagtatcacaggctcaatctattattatcggtacgaagcagacagtcaaagcactgaagcgcaattctgttaaggaagtcgtcgtagcaaaggacgctgatccttgtctgacgtcaggtgttatcaatctggcaaatgaacaaggggttccagtctcaatggcagagtccatgaaaaagctcggcaaagcctgcggaattgaagtcggagctgcagctgttgccattattcaataacgtactcgttgtttttgcttttatgcaaaggcattgttttttgcttttaaatgaaccacctgggtatgtgggttataaaacgtaatgaagggaggaaatacaaaatgcctacaattaatcagctagtccgcaaaggacgcgtaagcaaagttgaaacttctaagtctccagcacttaacaaaggatacaacagcttcaagaaagagcacactaacgtatcttcaccacaaaaacgcggagtatgtacccgtgttggtacaatgacaccgaagaagccgaactcagcgcttcgtaaatatgcccgtgttcgcttaactaacggaatcgaggttacagcctacattcctggtatcggacacaacctgcaagagcacagtgtcgtattgatccgcggtggacgtgtaaaagacttaccgggggtacgctaccacatcgtgcgtggcgcacttgatactgccggagttgaaaaccgtgcacaaggccgttctaaatacggtacaaaacgtcctaagaaaaaataattccgtttgaatacaaataaaagggtttttaaaagcaaggagttctggcaatgctgttaagggcgtcgggcttttcgcgccaagcgtcagtttgatcccggcagctgaaccgtgaaatccctctgcttgctgtaaacccgtaacaagagaagggaggataatcagatgccacgtaaaggtcctgtagcaaaaagagacgttttacctgatccgctttacaactctaaactggttactcgtttgatcaacaaaatgatgatcgacggtaaaaaaggtaaagctcaaacaatcctatacaagtcattcgatattattaaagaacgtaccggcaacgatgcaatggaggttttcgaacaagcattgaagaacatcatgccagtgcttgaagttaaagcacgccgcgtaggtggtgcgaactaccaagtacctgtagaggttcgtcctgaacgccgtacgactcttggacttcgctggttagtaaactacgctcgtcttcgcggagaaaaaacgatggaagagcgtttagctaacgaaatccttgatgcagctaacaacactggtgctgctgttaagaaacgtgaagatactcataagatggctgaagcaaacaaagcgttcgctcactatcgctggtaatctcacacgacaaaatattattccctaagaaggaaggagaaaagacccaatggcaagagagttctccttagaaaaaactcgtaatatcggaatcatggctcacatcgatgccggtaaaacgacaacaactgaacgtatcttgttctacacaggccgtatccataaaattggtgaaactcacgaaggggcttcccaaatggactggatggagcaggaacaagaacgcggtatcacaatcacatctgctgcaacaactgcacagtggaaaggctaccgcgtaaacatcatcgacacaccaggacacgtagacttcacagttgaggttgaacgttccctgcgcgtacttgatggtgccgttgccgttcttgatgcacaatcaggcgttgagccgcaaactgaaacagtttggcgtcaggcgacaacttacggagtacctcgtatcgtatttgtcaacaagatggacaaaacgggtgcggacttcctttactctgtaggaactcttagagaccgtcttgaggcgaacgctcacgcgatccaattaccgattggcgccgaagacaatttcgaagggatcatcgaccttgtagaaaacgttgcgtactactatgaagatgaccttggaacacgctctgaagcgcgtgaaatccctgctgagtacaaagacaaagctgaagagcttcgcgctagcttgattgaagctgttgctgagcttgatgaagagcttatgatgaagtacttggaaggtgaagaaatcacagttgacgagctgaaagcagcaatccgcaaaggaacttgtaacgttgagttctatccggttctatgtggttcagctttcaaaaacaaaggtgttcaattagtgcttgacgcagttcttgactacctgccagctccaactgacgtaccagcaatcaaaggtactctgcctgattctgatgaagaggttactcgtgagtcttctgacgatgcacctttctcagcgcttgcatttaaagttatgactgacccttacgttggtaaattgacgttcttccgtgtgtactcaggaacacttgattccggttcatacgtaagaaactcaacaaaaggcaaacgtgagcgcgtcggccgtatcctgcaaatgcacgccaacagccgtgaagaaatctctactgtgtacgcaggggatatcgctgctgctgtaggtttgaaagacacgactacaggggacacgctttgcgacgagaaaaaccttgttatcctggaatcaatggaattccctgagcctgttatccacgttgcaatcgagcctaaatctaaggctgaccaagacaaaatgtctactgcactggctaaattggctgaagaggatccaacattccgtgcgcatactgaccctgaaacaggtcaaacgatcatcggcggtatgggtgagcttcaccttgatatcatcgttgaccgtatgaaacgcgaatttaaagttgaagccaacgtcggtgctcctcaagttgcgtatcgtgaaacattccgtgcgagcgcgcaagttgaaggtaaattcgtacgtcagtctggtggacgcggacagttcggacacgtttggatcgaattctctccaaacgaagaaggaaaaggctttgagttcgaaaacgcaatcgtcggtggtgtcgttcctcgtgaatacattccggctgttcaagcaggacttgaagatgcacttcaaaacggtgtagtcgcaggttaccctgttatcgacatcaaagcgaaactttttgacggttcttaccacgatgtcgactctaacgaaatggcgtttaaaatcgctgcttccatggcgcttaaaaacgcggcaagcaagtgtaacccagttattcttgagccgatctccaaagttgaagtcgttatcccagaagaatacatgggagacatcatgggcgacattacgtcacgccgcggtcgcgtagaaggtatggaaggacgcggaaacgctcaggtcgttcgcgcgatggttccactttctgaaatgttcggttacgctacggctctccgttcaaacacacaaggacgcggtacgttcacaatggtctttgaccactatgaagaagtgcctaagagcatcgctgatgagatcatcaaaaaaaatcaaggtgaataattgattttgcctcttcattaaagtataactactattgtaagatgagaaagtgaaacattgctttcactttctatcactctatataacaaaaactaacctttttaaggaggattttcagaatggctaaagaaaaattcgaccgttccaaatcacatgccaacattggtacaattggacacgttgaccatggtaaaactacattaacagctgctatcactactgtgcttcataagaaatctggtaaaggtactgctatggcatacgaccaaatcgacggtgctccagaagagcgcgagcgcggtatcacaatttctactgcacacgttgagtacgaaactgacaaccgtcactatgcacacgttgactgcccaggacacgctgactatgttaaaaacatgatcactggtgctgcgcaaatggacggtgcgatccttgttgtttctgctgctgacggcccaatgccacaaactcgtgagcacatccttctttctcgtaacgtaggtgtgccttacatcgtagtattcttgaacaaatgcgacatggtagacgacgaagagcttcttgagctagttgaaatggaagttcgcgatcttctttctgagtatgagttccctggtgacgatgtaccagttatcaaaggttctgctcttaaagctcttgaaggagatgctcagtacgaagaaaaaatctttgaactgatggctgctgttgacgagtacatcccaactccagagcgtgaaactgacaagccattcatgatgcctgttgaggacgtattctcaatcacaggtcgtggaacagttgctactggacgcgtagagcgcggacaagttaaagtcggtgacgaagttgaaatcatcggtcttcaagaagaaaacaagaaaacaactgttacaggtgttgaaatgttccgcaagcttcttgactatgcagaagctggagacaacatcggtgcacttcttcgcggtgtatctcgtgaagaaatccaacgcggtcaagtacttgctcaaccaggtacaatcactccgcacaaaaaattcaaagctgaagtttacgttctttctaaagaagagggtggacgtcacactccattcttctctaactaccgccctcagttctacttccgtacaactgacgtaactggtatcattcagcttccagaaggcgtagaaatggttatgcctggagacaacatcgaaatgactgttgaattgatttcaacaatcgcgatcgaagacggaactcgcttctctatccgtgaaggcggacgtacagttggttctggcgttgtttcttcaatcatcgaataatacttataaaataaaaaacgagatccagccgggtctcgttttttattttgagccgctatgctaaagggatttattttccgcctgtaagtccttgattaacactgcttgaatctgtataataaaaaaagtgtgcaaaagccggtaatattcaatattaccttgcaacatgcctataaattttgtataatagtgcatgttggtctttgactgcgatgaagtgagaggttgctgacacacccggccgctttgccatggcaaggtgattcaggtttttctcacggagaattgtctaatgtaagtaggcgaaaaggagggaaaataatggcaaaacaaaaaattcgtattcgtttaaaagcgtatgatcatagaatccttgatcaatctgctgagaagattgttgaaacggctaaacgttccggagccagcgtttctggtccgattccgttgccaactgagaaatcagtttacacaatccttcgtgcggtgcacaaatacaaagattctcgtgagcaattcgaaatgcgtacacataaacgtttgatcgacattgtgaacccaacaccacaaactgttgatgctctaatgcgattagatttaccatctggtgtcgatatcgaaattaaactttaatctaaaatatagaatgatctttataggaggtgtgacgaatgaccaaaggaatcttaggaagaaaaattggtatgacgcaagttttcgcagaaaacggtgatcttattccggtaactgttatcgaagctgctcctaacgttgtgcttcagaagaaaacttctgaaaacgacggctatgaagcgattcagatcggttttgacgacaagcgtgaaaagcttgccaacaaaccagaaaaaggacacgttgcaaaagcggaaactgctcctaagcgcttcgttaaggaattacgcggagtggatatggatgcgtatgaagttggtcaggaagtcaaagttgatattttctctaacggagaaatcgtagatgtaacaggaacatcgaaaggtaaaggtttccaaggcgctatcaaacgccacggacaatctcgcggaccaatgtctcacggttcacgctaccaccgccgtcctggttcaatgggaccggtagaccctaaccgtgtattcaaaggaaagctgttgcctggacgtatgggcggagagcaaatcactgttcaaaaccttgaaatcgtaaaagtagatgcagagcgcaaccttcttttagttaaaggtaacgttcctggtgccaaaaaatcactagtcactgttaaaagtgctgttaaatctaaataattctcttaggaaaggaggaaattgatcatgccaaaagtagctttatataaccaaaacggttctactgctggtgatatcgaattaaacgactctgtatttggaatcgagccaaatgagagcgtagtattcgacgctattcttatgcaaagagcttccttgcgtcaaggaactcataaagtaaaaaatcgttcggaagtacgtggcggaggtcgcaaaccttggcgtcaaaaaggtaccggccgtgctcgtcaaggatctatccgttcaccgcaatggcgcggaggtggtatcgtattcggtcctacaccacgcagctatgcatataaattaccgaaaaaagttcgccgcttggctatcaaatcagcattgtcttctaaagtgaatgacaacaacttgatcgttcttgaagatcttaatcttgatgcggttaaaacaaaagaaatggcagctatccttaaaggtctgtctatcgagaagaaagctttaatcgtaactgcggatgcaaacgagacagttgaactatctgctcgcaaccttccaggagttactgttgttgaagctaacggaatcaacgtcctcgatgttgtcggtcacgagaagcttgtgatgacgaaagcagcggttgaaaaagtagaggaggtgcttgcataatgaaagatcctcgtgatgttctaaagcgccccgtcattactgaacgttctgctgatttaatgactgaaaaaaaatatacgtttgaagttgacgtaaaagccaacaaaacagaagtgaaagacgctgttgaacaaatctttggagtgaaagttgaaaaagtcaacatcatgaactacaaagggaaattcaaacgtgtcggccgctactctggtatgacaaacaaacgcagaaaagcgattgttaagcttactgaagacagcaaagaaatcgaaatttttgaagcttaatcacttgtaaaaagaaggagggaaattcaaaatggcgattaaaaagtacaaaccgacctctaacggacgtcgcggcatgacttcttctgatttcgcggaaatcacgacagatcagccggaaaaatccttgcttgccccgcttcacaaaaaaggcggacgcaacaaccaaggtaaattaactgtacgtcatcaaggcggcggacataaacgccaataccgtattatcgacttcaagcgcgataaagatggtatacctggacgcgttgctacagttgagtacgatccaaaccgttcagctaacattgctctaattaactatgtagacggagaaaaacgctacatcctagctcctaaggggcttcaagtaggcactgaaatcatgtcaggtccagaagctgacattaaagtaggtaacgcacttccactgatcaacatccctgttggtacagttgtgcacaacattgaattaaaacctggaaaaggcggacagcttgtacgttcagctggtacatctgctcaagttcttggtaaagaaggtaaatacgttcttgtacgtcttaactccggtgaagttcgcatgattctttctgcttgccgcgcaacaatcggtcaagtgggtaacgaacagcatgaactgatcaacatcggtaaagccggacgttctcgctggaaaggcgttcgccctacagttcgcggttctgttatgaaccctaacgatcacccgcacggtggtggtgaaggacgcgctccaatcggacgtaaatcacctatgtctccatggggtaaaccaactcttggattcaaaactcgtaagaaaaagaacaaatcagataaattcatcgtacgtcgtcgtaaaaataaataacggggttgtctacggttcatatcggaccgtagtgcaatcacgaagggaggttccaaaatggctcgcagcttaaaaaaaggaccatttgtcgatgatcatctaatgacaaaaatcgagaaattaaatgaagcggataagaaacaagttgtgaaaacttggtctcgccgttctactattttcccgcaatttatcggtcacacaatcgcagtctatgatggacgcaaacatgtgcctgtttacatctctgaagatatggtaggtcacaagttgggtgaattcgcaccgactcgcacttacaaaggtcatgctagtgatgacaagaaaacaagacgctaatgagaggaggcttttaaatgcaacaagctaaagctgtcgcaagaacagtccgtattgctcctcgtaaggcacgtctagtaatggacctgattcgaggcaagcaagtaggtgaagcagtatcgatcttaaaccatacgccaaaagctgcttccccgattattgaaaaagttttaaaatctgctatcgccaacgctgagcacaactacgaaatggatgcaaacaacctggttgttactcaagcttacgtgaacgaaggccctacgttgaaaagattccgtccgcgcgctatgggacgtgcaagccaaatcaacaaacgtacgagccacattactatcgttgtatcagaaaagaaggagggataactcgtgggtcaaaaggtaaatccagtcggtcttcgtattggggttatacgtgattgggaatctaagtggtacgctggcaaagattacgctgacttccttcacgaagatctgaaaatccgtgaatttattaatcaacgcctgtctgacgcttcagtttctaaagtagaaatcgagcgtgcggcaaaccgtgtaaatattacgatccacacagctaagcctggtatggttatcggtaaaggcggttccgaagtcgaagcgcttcgcaaagcccttaacagccttactggcaagcgtgtacacattaacattcttgaaatcaaaagagctgatcttgatgctcagctagttgctgataacattgctcgtcaattggaaaaccgtatctctttccgtcgtgcgcaaaagcaacaaatccaacgcacaatgcgcgctggtgcacaaggaattaaaacaatggtttccggtcgtcttggcggcgctgacatcgctcgttctgaatactacagtgaaggaactgttccattgcacacacttcgtgcagacatcgactatgctacatctgaagctgacacaacttacggtaagcttggtgtaaaagtctggatctatcgtggagaggttcttcctactaagaagaaaactgaggaaggaggaaaataatatgttaatgccaaaacgcgttaaatatcgcagagagcatcgcggaaaaatgcgcggccgtgcgaaaggcggcactgaagtgcatttcggtgaatacggtatccaagctcaagaatcttcttggatcacaaaccgccaaatcgaagcagcacgtattgcgatgactcgttacatgaaacgtggcggtaaagtttggatcaaaattttcccttctaagccttatacagctaagcctctagaggttcggatgggttccggtaaaggtgctcctgaaggatgggtagctgttgtaaaaccgggcaaagttttatttgaaatttctggtgtgtctgaggaagtcgctcgcgaagctcttcgtcttgcatctcacaaattgccaattaaaacgaagttcgtaaaacgtgaagaaattggtggtgaatcaaatgaaagctaatgaaattcgtgaccttaccactgctgaaattgaacaaaaaagtaaagtctcttaaagaagaacttttcaatcttcgctttcaattagcgacaggacaacttgaaaacactgctcgcattcgtgaagtgcgcaagtcaatcgcgcgcatgaaaactgtgattcgggaaagagaaattgctgccaacaaataattccggagggaggttctctaaaacatgagcgaacgcaatcagcgcaaagtctaccaaggacgtgttgtttctgacaaaatggataaaaccattactgttgttgtagaaacatacaaaaagcattcactctacggtaaacgcgtaaagtactctaaaaaattcaaagcacatgatgaaaataaccaagctaaaatcggagacatcgtaaagatcatggaaactcgtccattatctgcgactaaacgttttcgtctagttgaagttgtcgaagaagctgttattatctaataaagttcggaaacttttttccgaagggaggtaacaaataatgattcaacaagagactcgtttaaaagtagctgataactctggtgcccgtgaagtgttaacaatcaaggtgcttggtggttctggacgcaaaacagctaacattggtgatgtcattgtttgcacggttaaacaagcaacaccaggaggcgttgtcaaaaaaggtgatgtcgtgagagctgtagtcgtacgttctaagagcggtgcacgcagaaatgacggatcttacatcaaattcgatgagaatgcatgtgttatcatccgtgacgacaaaagcccgcgcggaactcgtatcttcggacctgtagcacgtgaacttcgtgataacaacttcatgaaaattgtttctctagctccagaagtactttaatgatatcaatgccggactaaggaggtgcgatcaggatgcatgttaaaaaaggcgataaagtaatggttatctctggtaaagacaaagggaagcaaggtgtaattcttgcagctttccctaaaaaagaccgcgtaatcgttgagggtgtcaacatggtgaagaagcactcaaagccgactcaagcaaaccctcaaggcggaattttaaatcaagaggcgccaattcatgtgtcaaacgtaatgccgctcgatcctaaaacaggtgaagtgactcgcgtaggatacaaagtagaaaatggcaaaaaagttcgtattgcaaaaaaatctgggcaagttctagataactagtaataaaggaagggaggtctatctcatgaaccgccttaaagaaaagtacaataaagaaattacacctgcattaatgaaaaagttcgaatacaaatctgtgatgcaagtgcctaaaatcgaaaaaatcgtaatcaacatgggtgttggtgacgctgttcaaaacgctaaagctatcgatagcgctgttgaagaactaacgtttatcgctggtcagaaacctgtcgttactcgtgcgaagaaatctattgctggattccgtcttcgtgaaggaatgccaatcggtgcgaaagtaactcttcgcggagagcgcatgtacgatttccttgataaactaatttctgtttctttaccgcgtgtacgtgacttccgcggaatttcaaaaaaatcttttgacggtcgcggaaactacacactaggaatcaaagaacagctgatcttccctgaaattgactatgataaggtaactaaagttcgcggtatggatatcgttattgtaacgactgccaacactgatgaagaagctcgtgaactgttaactcaattaggtatgccattccagaaataatcaatgaaagggaggcgaaatcgtggctaaaaagtcaatgattgcgaaacaaaaacgcacaccgaagtttaaagtacaagagtacactcgctgcgaacgctgcggccgtccgcactctgttattcgtaaatttaaactttgccgtatttgtttccgtgaacttgcatataaaggacaaattcctggcgttaaaaaagccagctggtaatccccgtttatgggaaggaggttattaaataatggttatgacagatccgattgcagatatgctgactcgtattcgtaatgcaaacatggtacgtcatgagaagctcgaaattcctgcttctaagttgaaaagagagatcgctgaaatcttgaaaagagaaggtttcatccgtgacgtagaattcattgaagataacaaacaaggcatcatccgtgttttcttgaaatacggacaaaacaacgagcgtgtcatcactggccttaaaagaatcagcaaaccaggtctgcgcgtttacgctaagtcaaacgaagtgcctcgcgtgcttaacggacttggaatcgcaattctttctacatcacaaggtgtgttaacggataaagaagcccgcgctaaacaggctggcggagaagtattagcatacgtttggtaagaagtttaacatgaatggaggtgtttggtatgtctcgtgtaggtaagaagctacttgagattccttcaggcgttacagttactctgaacgacaacactgtaaccgtgaaaggaccaaaaggagaattaactcgtacgtttcatcctgatatgaagattaaaattgaggacaatgtacttactgtagaacgtccttcagataataaagaacaccgtgcgctgcatggcacaactcgcagcatcatcggaaacatggttgaaggtgtatctaaaggttttgaaagaggtttggaattagtcggtgtcggttaccgtgcttctaaatccggaaacaaacttgttttgaacgttggatactctcaccctgtagaaatcgttcctgaaaacggaattgaaatcgaagttccatctcaaacaaaagtggttgtaaaaggtacagataaagaacgtgttggagctactgctgcaaacattcgcgctgtacgttctccagagccttacaaaggcaaagggatccgctatgaaggagaaatggttcgtcgtaaagaaggtaaatctgctaagtaaaaccgcttaatgtgagaaaggagtgacccagatgattacgaaaacaagcaagaatgctgcacgtcttaaaagacacgctcgtgttcgtgcgaagctttcaggaacccctgaaagacctcgtctaaatgttttccgttcaaacaaacatatttacgcacaagtgatcgatgacgtgaacggtgttacacttgtgagtgcatctactcttgataaagactttaacgctgaaaatggcagcgatacggctgcggctgcaaaagttggagagcttgttgcaaagcgcgcttctgaaaaaggtatcacaaatgtcgtgttcgaccgtggcggttacctttatcatggacgtgtaaaagcattggctgatgctgcacgcgaagctggattagaattttaataaaagaaggagggacatatgaatatgcgtcgtattgacccaagcaaattagagttagaagaacgcttagttaccgttaaccgcgtagcgaaagttgttaaaggtggtcgtcgtttccgtttcgcagctctagtcgttgtcggtgacaaaaacggtcacgttggtttcggaactggtaaagcacaagaagttccggaagcgattcgcaaagctgttgaagatgcgaaaaagaatttgatcgaagtaccaatggttggaactacaattccacacgaaatcatcggacgtttcggtgcaggaaacatcttgttaaaacctgcttctgaaggtacgggagtcatcgctggaggcccagtacgtgcggtacttgagcttgcaggtgtatctgatatcctttctaagtctttaggttctaacacaccgatcaacatgatccgtgcaacagtccaaggtttaagcgagctgaaacgcgctgaggacgttgcgaagcttcgtggaaaatctgtagaagaactgttaggataaggagggaacattaatggctaaattagaaattaccctcaaacgcagtgtaatcggacgcccggaagatcagcgcattactgtaagaacgcttggtttaaagaaaacaaaccaaactgtcgttcatgaagacaacgctgcaatccgcggtatgattaacaaagtatctcatttagtttctgttaaagaactttaaaaataaacgataggctaaggaggtgtccaaatgaaacttcatgaattaaagcccgcagaaggttcacgtaaaacgcgcaaccgcgtaggtcgtggtattggttctggtaacggtaaaacagctggtaaaggtcataaaggtcaaaacgctcgttctggcggcggtgtacgtcctggattcgagggtggacaaatgcctttattccaacgtcttcctaaacgcggtttcacaaacatcaaccgcaaggaattcgctgtggtcaacctagacaaactcaacagctttgcagaagggacggaagttactcctgaacttcttttagaaacaggtgtaatcagcaagtttaaatctggagtgaaaattcttggcgacggtaaattagaaaagaaattaactgttaaagccaataaattctccgcttctgctaaacaagcaattgaggctgctggcggtacagctgaggtgatctaacttgtttaagacaatctccaattttatgcgtgtgaaggatattcggaataagattatcttcactcttttaatgcttatcgtctttcgtctcggttcgttcattcctgtgccgcacgtaaacacagaagttttaaaggcacaggatcaaatgagcgtatttgggattctaaacacatttggcggcggtgcattgttcaacttctccattcttgcgatgggaatcatgccttacatcacagcttctatcatcatccagctcctgcagatggatgttgtgccgaagtttaccgaatggtctaagcagggggaagttggtcgccgaaaactagctcagttcacaaggtacttcacgatcgttcttggatttatccaggctttaggtatgtcttacgggtttaacaacatggccggcggcgcgttgattacagacccgggagtcggtacttatttgcttattgcgattgtactaactgctggaactgcttttttaatgtggctgggagaacaaattacgtctcatggagttggtaacggaatatccattatcatcttcgccggtatcgttgccggtattccgcagacgattaatcagatctacgctcagcagtttgtagatgctggagatcagttattcttgcaaatcataaaggttgtcgttatattggttgcgattttagcgattgtcgttggcgttattttcatccaacaggcggttagaaaaatctcaattcaatatgcgaaaggttcaggccgttcaccggttcctggcggccagtctacacacttgccgctgaaggttaacccggcgggagttattccggttatctttgccgtagcatttatcaccactccgcggaccgtggcaacattctttggctccaatgacgtcacgaattggattcaaaaaacgtttgattacacgcatccggtcggaatgggagtttatgcagcattgatcatcgcctttacctatttctatgcatttgtgcaggttaaccctgagcaaatggccgataatcttaaaaaacaaggcggctatattccgggagttcgtccaggaaaaatgactcaagatagaattacgagcattttgtatcgacttacatttgtaggctccatattcttggccgtgattgccattcttcctgtcttgttcgttaatattgctgggctgccttcttctgcacaaattggtggaacaagtttgctgattgtcatcggggttgcacttgaaacaatgaagcagcttgaaagccagctggtaaaacgaaactatcgtggatttatgaagcactagaggaaatggggcgcgcccattccctctaaaatagagaggacggggaatccgaaatgaacttagtcttaatgggactgcctggagccggtaaagggacacaggctgaacggattgttgaagattttgggatacctcatatctcaacaggagacatgttccgcgctgcgatgaaagaagaaacggatctgggactcgaagccaaatcatacattgataaaggcgagcttgttccggatgaagtgacaattggtattgtcagggagagacttggcaagaatgattgtgacggaggttttcttctggacggatttccgagaacagtcgctcaagctgaagcacttgaggaaattcttaaaggacttggcaagtcgattgaccatgtcatcaacattcaagtcgataaagatgcattgatggaacgtctgacaggacgcagaatctgcaaaaactgcggtgcaacttatcatttagtctttaatccgcctgcaaaagaaaatgtatgcgacaagtgtggaggagagctttatcagcgtgaagacgataatgaagctaccgtatccacgcggttagaggtcaacatgaagcaaacccagcctttactcgatttctatgaagataaaggatatctcgtaaacattgacgggcagaagcacatcaatgaagtttacgctgatataaaggagcttctcggaggccgggacaaatgattatttgtaaaactccccgagaaatcgaaatcatgcgggaggccggacgaattgtcgctttaactcatcaggagctaaaaaagcacattaaacccggcatctcgacaaaagaattggatcaaattgccgaacgttttattacaaagcaaggtgcaatcccatcttttaaagggtataatggttttcgcgggagcatttgcgtttcggtcaacgaagaactcgtgcacggtattccgggaaaacgagtccttcgcgacggggacatcatcagcatcgatatcggtgcgaagctaaacggttatcatggtgactccgcttggacttatccagtgggtacgatcagcgatgatgatcagaagctgctggatgtgacagaggagtctttatatagaggcttgaaggaagcaaaaccgggagaacgtttgtcgaatatttcccacgcaatacaaacgtatgtcgaaagcgaacaattttcagtcgtcagggaatatgtaggacacggggtagggcaggatctgcatgaggatccgcaaattcctcactacggtccgccgaacaaaggcccgcgtttaaagcctggcatggtcttggccattgagccgatggtcaatgcaggtacacgctatgtcaaaacattggctgacaactggacggttgtaactgtggacgggaagaagtgtgctcactttgaacacacgattgccattacggatgccggttttgagatactgacaaaagcctaggtgaaatgagatgtatcggaaaacacctgaaattggacagttcgtacgcatgacaagaggccgcgaaatgaaccaatacgcagttgttattgatatagtcgatcatcatcatgtgctggtagcagacggagaaaagcgtaaatttcattctcctaagaaaaagaatatcaatcatttaaccttttatgattgcgtatctccggaagttcagaacagtataaacgaaacagggcgtgtgacaaacggaaaattgagattttctcttttgaaatttgtcagagagcaagttactgatttgaagaagggagaacacttgaatggcgaaagacgatgtaattgaagtggaaggtactgtagtcgaaacgctgccaaacgcaatgttcaaagttgaacttgagaatggccacacggttttggctcacgtatctggtaaaatccgcatgcacttcattcgcattttacctggagacaaagttacggtagaattatctccatatgacttaactcgtggtagaattacgtaccgttacaaataaagcactccggaaattgaaggaggttggaaacacatgaaagtgagaccatcagttaaaccgatctgtgaaaaatgcaaggtcattcgcagaaaaggaaaagtaatggtgatctgtgaaaatccaaagcataaacaaaaacaaggataatttttaaggaggtgcgagagagatggctcgtattgctggtgtagatatcccacgtgataaacgtgttgttatttcattaacatacatctttggaatcggtcgtacaacggctcagcaaatcttaaaagaagctggagtttctgaagatactcgcgttcgtgatttgactgaagaagaacttggtaaaatccgtgacgtgatcgacaaattgaaagtagaaggtgaccttcgccgtgaagtgtctcttaacatcaaacgtctgatcgaaatcggaagctaccgcggaattcgtcatcgtcgcggattgcctgttcgcggtcaaaatactaaaaataacgcgcgtactcgtaaaggtccgcgtcgtactgtagctaacaagaaaaaataagcaagggaggtaattaaacaatggctgctgcacgtaaaacaaacacgcgtaaacgtcgcgtgaaaaagaatattgaatctggaattgctcatatccgttcaactttcaacaacacgattgttactatcacagatgttcatggcaatgctctttcttggtcaagtgccggagctttaggatttaaaggttctaaaaaatccactccattcgctgcacaaatggctgctgaaacagctgctaaaggttctatcgaacatggacttaaaactcttgaagttactgtaaaaggaccaggttccggccgtgaagctgcaattcgtgcacttcaagctgctggactagaagttacagcgatcagagacgtaacgcctgttcctcataacggatgccgtccgccaaaacgtcgccgcgtgtaatttgtttgtatagattttgtgtccctgtcaataatgggttatgatacagttaatttataaaacgaatgcacactcgttgcctgagcacatacgggactaaacaatggggaatttcggatagaatcagagaaattctttccggggtttcgacgttttgaaggagggttttatgaaatgatcgagattgaaaaaccaaaaatcgaaacggttgaaatcagcgacgatgccaagtatggtaaatttgtcgtagagccacttgagcgtggatatggtacaactttgggtaactccttacgtcgtatccttttatcctcactccctggtgccgctgtaacatcgatccaaatagatggtgtactgcatgaattctcgacgatcgaaggcgttgttgaagatgttacaacgattatcttaaacattaaaaaacttgcactgaaaatctactctgaagaagagaagacgcttgagattgatgttcagggtgaaggagttgtaacagctgctgatattacccacgacagtgatgttgagattttgaatcctgatcttcacattgcgactcttggccaaaatgcgagttttcgagttcgcttaactgctcaaagaggtcgcgggtatacaccagctgacgcgaataaaagagacgatcagccgattggcgtcatcccgattgattccatctttacacctgtttctcgcgtatcttatcaagttgagaatactcgtgtgggtcagattacaaactatgacaaacttacgcttgacgtatggacagatggaagcactggaccaaaagaagctattgcacttggttcaaagattttgactgaacaccttaatatttttgtcggtttgaccgacgaagctcagcacgctgaaatcatggtagaaaaagaagaggatcaaaaagaaaaagttcttgaaatgactattgaagaactcgatctttcagtccgttcttacaattgcttgaagcgtgcaggaatcaatacagttcaagaacttgcgaacaaaactgaagaagatatgatgaaagttcgcaacctgggccgcaagtcgcttgaagaagtaaaagcgaaacttgaagaacttggacttggccttcgcaaagacgattgactagtttccatgtgaactaggattttcgtgtgttttttatttcagatagagtatttcaataaaggaggggacaccacatgtcatacagaaaactaggacgcactagtgcacagcgtaaagcaatgctgcgtgatcttacaacagacttgatcatcaacgagagaattgaaacaacagaagctcgcgcgaaagaacttcgctctgttgtagaaaaaatgattacacttggcaagcgcggagatttacacgcacgccgccaagcagctgcatacatccgcaatgaggttgcagatgcagagaaaaaccaagatgcacttcaaaaacttttctctgatgtagcacctcgttatgaagagcgccaaggcggatacacacgtattatgaagcttggtcctcgccgtggtgacggagcaccaatggctatcatcgaattggtttaatcacatattttgtgtgtctaaagaagggcgggacagtttttaactggatctatgccctttttttagataccggggaattttctatgataaaagaatagtcagaaaagcagagctttagaggagaggaggccggacgggcaaatgaatcaagagcgattaatcgctgcagaagatatcacgtttcgctaccagaaagatgcagacaggcctgcgcttgatcacgtatctttccatgtgtcgaaaggcgaatggcttgcgatcgtcggtcacaacggttcaggaaagtcgacgctcgcccgtgctttaaacggactgattctgcctgatgaaggatcgattaaagtaggcggtatcaagctgatggaagagacggtctgggatgtccgaaaaaaggtcggcatggtgtttcaaaatccggataaccaatttgtcgggacaaccgtccgcgatgatgtggcttttggtttagaaaacagcggagttccaagagaagacatggtggaaagggtggattgggccgttcaacaggtgaacatgcaagaatttctcgatcaagagccgcaccatctctcgggaggacaaaagcagcgtgttgcgattgcgggagtgcttgctgcccggcctgacatcatgattctcgacgaagcgacttccatgctcgacccgatggggcgggaagaagtgctggatacggtcagaaggctgaaagaccaaggaatggttacggtcatttcgattacccatgacttaaacgaagccgcgaaggccgaccggatcatcgtcatgaacagcggtagaaaatttgccgaaggcacgccgcaggaagtctttcgtctgaatcaagatctgtttaaaatcgggcttgatttgccattttcttttcagctcacccaaatgctgaaggaaagcggtctggctctgaaaggcgatcatctgacacaagaaggattggtgaatgagctatggacattgaaatcaaagatgtagagcaccgataccagatgaaaacgccttttgaacgcctggcgatctatgatgtcaacgctgtgattaaagaaggtagctatgtcgccgtaatcggccatacaggatcgggaaaatcgactttgcttcagcacctgaacgggcttttaaaaccgacaaaaggacagatacgcctcggcgaggacgttcttgaagcaggcaaaaagaataaacatctaaaagctttgcggaaaaaggtcggcattgtctttcagtttcctgaacatcagctgtttgaagaaacaattttaaaggatatcgcattcggtccgatcaactttggcatgagccgggaaaaggcggaagaaaaagcgagggaaatgctgaagctggtaggtttgggtgcagagctgtccgacaggtctccgtttgaactaagcggagggcaaatgcgccgcgtggccattgcgggagtgctggcgatggagcctgaggttcttgtcctcgatgaaccgacggcagggcttgacccaagaggccgcaaggagatcatggacatgttctacagcctccataagcagaggaacctgacgacaattctcgtcacccacagtatggaagacgcggcagcgtatgcagatgaactgattgtgatgcataaagggacggtcaaagcaaaagggacgccgcgggagcttttttcaaggaaagacgacattgccgctttagggcttgatttgccggaaacgattaaattccaaaaacgccttgaagaaacgctggggattacgttcaaagcgccgattttgacgattgaagaagcagcctccgaagttaaagctctttttcaggaggaaaatgccctatgatggacaatatcattatcggcaaatacgtacccgggaaatcggtcattcatcggctcgatccgcgtacaaagctgttaaccattttcctttttgtctttatcgtttttttcgcgaataatacggaaacatatgcattgctcggcctgtttacggttgcagccgccgctttgtcaggcgttccggtgcgattccttataaaaggaatgaagccggtgttctggattgtgctgtttacgtttctgcttcatatttttatgacaagggaaggaccggttctcgccgatctcggcctgtttaaaatttatgaacaggggcttgttcaagggatttttatttctctgcgctttgtttacctcatcatgatcacaacgattttaacattgacgacgactccaatcgaagtgaccgatggtttggagcatttgctcggtccgtttaaaaaattgaagcttcccgtccatgaacttgctctcatgatgtccatctccctcagatttataccgactttgatcgaagagacggataagatcatgaaagcgcaaatggcaagaggcgtcgattttgcgaacggcccggtcaaagaacgcgtcaaagcgatcgttcctctccttgtcccgctttttgtcagtgcctttaaaagagctgaagagcttgcaaccgctatggaggcgcgaggatacaggggaggagaaggccgtacaaaatacaggcagctgacatggaaatggaaggatacttccgtgctcctcattttagctgttcttggcgttttgctaattttattgcgtacttaggtgatggacgatgagaatgaagtgcacgatttcatatgacggacaccttttttacggctaccaagtgcagcctgggcaaagaacggttcaggatgagcttgaaaaagcgctgcaaacgctccataaagcgaaggagcgtattcctgtcgtttcatccgggcgcaccgacagcggcgtccacgcagtcggacagacgattcattttgacagtccgctatccattcctgaggcgaaatggccgtatgcattgaatgccctgctgcccgatgatatatcggtccgcaaggcggaagctgtcaatgatcaatttcatgcgaggttttctgcgaaaagaaaagaataccggtatatgatatacaggggcagacatccggacgtttttaaacgctactatgcataccatgttccttatgaccttgatatggagaaagttaaggaagcctcccgctatctggtcggaacccatgacttcacaagcttttgtgcgaccaaaaccgaagtgaaggataaagtcagaacggtccatgaactggaatggtctgacacaggggacggactgcagatgagaattgtgggaagcggatttttgtataacatggttagaatcattgccggtacgcttcttgatgtaggaaccggcaaattttcccctggtgacattgaaaagatgattcttgccaaaaaccgcgatgccgcagggcgcactgcaccggcacacggcttatatttatggcgtgttatctatgacaactaaaccaggtgtaacattttcttgacagagagtacagaaagttataagatatcatatggtatgtatttcaaccccacgataagccccggaaacttattgtgttttgaaatagaacgtaattgaagtttattgaaaatggcagatcatttaggagggaaatttaatgcgtacaacacctatggctaacgcaagtaatattgaacgcaagtggttagttgttgatgctgctggcaagacgctaggacgtctttctactgaagttgcatctatccttcgcggaaaacataaaccaacttacacaccacacgttgacactggagatcatgtgatcatcatcaacgctgaaaaaatcgagttaactggtaaaaagttaacggacaaaatctactaccgtcacactcaacatccaggcggtttaaaatcaagaactgctcttgaaatgcgtacaaactaccctgagaaaatgcttgaacttgcgatcaaaggcatgcttccaaaaggttctctaggtcgtcaaatgttcaaaaaattgaacgtataccgtggttctgagcatccacaccaagcacaaaaacctgaagtttacgaacttcgcggttaattaaaaaggaggttaccaatttggcacaggttcaatattacggtactggccgtcgtaaaagctctgtagcgcgcgtgcgtttagttccaggagaaggccgtatcatcgtgaataatcgtgaaatcagcgagcacatcccatctgcagctctaatcgaagatatcaaacaaccattaactttgactgaaacagctggtacttatgacgttttagtaaacgtacatggaggcggcttctccggtcaagctggagcaatccgtcacggtatcgcccgcgctttgcttgaagcagatccggaataccgttcaactctaaaacgtgccggtctactgactcgtgacgcacgtatgaaagagcgtaaaaaatacggacttaaaggcgcacgccgtgcacctcagttctcaaaacgttaatatatcaacgttcaagccctcatccggtcgctcggaagagggcttgttttttgcttaaaattgagttttgaccacattttgaccacgtttaattgaatttcttataattccatgtactttttaaatgtttcggccgttttttcttttgcggttttcgtgacatgtgtatagatgttcatagtcgtttgtatttctttatggcccaaacgggcttgtacttctttaagggatgcacctgcctcaaaaagaatggaagcgtgcgaatgtctgaatccatgaatcgtgatcctgtgaagcttatttttagctattatacggtttaaaatatcatttggatatgcaagcctcagagggcgcatatcgtcccgtatgaggacgtatttggcttctgtggtgattccattagacaagagcatttccttttgctgcgtgcgccatttcttaagtatttgggcggtttgttcatcaattttgatgattcgttttgaatgatatttttttgctgtttgaataacttcttttccgtcttcaaaaaacaatgtttgtttaatatttattgttctttcttttatatcaacgtctttccattccaaggccagaagttcccctttacgcatgccagtaaaaataagaacgtaaaacataacataatcttgctgtttgagttgtgagtgcgctttatcaagaaaaattttgatctcgtctttttcccaaaagttccgtttctcttcttcatccgataaaaaattttcttcttttttcgggataacaacataagccatcggattcgttgagatgtaatccattcttaaagcgtatttaaacacaaggttagcttgaattttcacatcttgagcggaattaatttcttgggctattcggtttattgctttttggcaatacgcttttgtgatgtcttttattttcaatttgccgaatagcggcaggatatgcttgttgaatttcgataatttggagtatctggtgcttcgctttattgttttagaatgtacagcccaccattctttaaagacatcctcaaaagtgatgtcatttcggataagagcattattatcgatttccttctggaattccgcagcggctgcgacagcttcttttttggtcttgaaaccccggcgggtcgtcgtttttctatctccggttttagggtcgatccctacacccattttaaaaagccatttatatcctgactttgtcttgtattgctggaatgaagccatattatcccccaatcctatttaaagtttcttttaactaacaataagatgaattttgttaaagtacatgttaaggcgtactttcgcaaatggttcagtgactttaaacatcttagcaatgaggtgagcatcagaaaaatgattttgtggaattttcattccatgaagcataaaagtggggatgcaaaagtgatatgagaagtaattggcttgtctctcctgataatctgaccaaaactttggcattgtttttttatctccttcatgtctgtaaaggtggcatagttcatgagcaaagtcgtcccactgctcgaaacgggttttccggctatctaatataatcgtatacacgtcattatacttgaaagaacaacttgggataggcttaaaataaacacttatgcctaacaactcagctatacgctcgaaatcaatttgctctggtgtaatgatactgatacttctgtacaagttttcaatccaatcttctaaatgactctttgtatacaccaagaagaacgcctcctaagcccatttatcaaattgagataattcttatttaaaacaaaggaaacatacgttctgttatttagtgaaaagaaaagcccttcatagggctcttctttatactgccgtcgttgttgttttatctcttctagcaagtcccataactcccgagataattagaagaatagcgggaagtaagtagaataagaaaatgcaaatcaggccaccgataccagaaataataagcaaaattccacctaatttagctttttttctaacaatcaccgaagcgataattccaaggattgagaggaagatagcaccccaacctaaaccaataatatcgcttgtgccagatgaattaaaagaggcatcgagtccgccgacaattaacgccaaaaaggcaccaataaaaccgaaaattccgcccattagacctaaaacaaattcagtagttcttttcattttgaattctccttacttaactggcacagtgaatgatactgctttgttattcataaagtcttcagtggttacatcaccaaaattcaacttgatttctttaatgttattgatatcaagctcttttccttctggtacggcaaactccagcactccgtcctgtttaacgccaccttgaacttctccaccaacttcgccatcagtcaaaaacatattggctgataattgcatgtctccgactactgcattaccttgatcaggatagaagtttaggactttatcagttgtattttcaatattgagtcctacgttaactttatctttcataatcttaacgtcgcctaaattaactttcattcctaaagcatcagtcttttggctgcttgcatcaacttttttagagccgtcgtctttcttctcttctgtcttcttgtctttggaattgtctgcccctgttgatacgtcatctgttgatccgcaggcagctaaggccaaagcaagtccaagagacaggaataaaactaaaaattttttcaatctaaatacccccagttcatatgtatatacgccttttataataggctaaaaatcgctatatttcaacacaatattacaaaaatgacaaatttttttactgctgtttacgagtttttaatgtatgaatctcgaattctgcatcagccactttgcgattgacaaagatgactccttctttaagagaggtgatttcatcaagtaacaggttatcagaattgatattttcggcatgctgagaatcaattttctcacttaatgctttgatgtcatctttggttgcgacatttttttcaagatcggttaggcggttgttaattgcctgaatctctttcaaaattagttcaaattctttgttttccatcgttttcacctcttttttaggctcaaaacgccaaaatttttggtagaccagtggtagacggtttgtagacgagtggtaaaccatttgtagacgggcgattcttcaatcccttgacacacaagggttgaagggcttgtaaattttacctttggtagacggtttgtaaggaattatatggaatcgtaatttatttgtaaacttcttataagataactaaataactaaagttaactaaataactaaagacggcgatcttttgttaatcagatttctttttcctgccttctttcagttgctccgtaatgatttcaagggcagcatctaaaatctcctgtgtaacttctccatcacgggcggcaatgaaggttttagggtcatttagaatcctctttgcttcgtcttcaaaaattttatcttgaaccttcgggtcgacgccacgaagtaagtagtcagttgtaacttcgaaaaaatccgctatcttaattaaggtttcataatcaggttgtctgaaaccacgttcataattagaaagattttggtgagggatattcaattttgcagctaaagctttttgagttaggttttccttctcccttaaagctcttatccttgctccgagagccataataattcctccattaagttattgctttcttcaaattgtacattactcttcattttgagtaaaaaaaattaaacaaaaagtataatttcatgttgacatatacgaatcgaagaattatcatgtaattaaagaattcttcgaaacgtataatggaggtgatgatcgtgagagtgaatgaaaaattaagagcaatcagacaatcaaaaggcataacacaaaaatttgttgcgaaaagtctaggaattcatacagccacttataacggatatgaattaggccgcaggaaaattcatgttgagttactgaaagacattgcggaagttttagacgaaccaattcaaaatttttttgaaaacaaaatatacgaatcgaagaattattacgataaaaaatcccatacagcataggaggcgaacactttggctaatctcggtatctcacttgataacttgccgaacgaaacggttttcgaaattgttaaagcgctttgcgaaaaagcttatcagcaaggcgtggaggacggcgtgaaaaaatattcgtatcctccaatattaaaaaacactcatttacaagagattttccaaatcaaatcggcagcggtgacaagactaaccggaattgattcctttccgaagttgaaaactattcaagctagatacccgcgcgatcttgtttttgaatggatcaaacaaaattcaacttgggttgaagaaaacacaagctattttcagaaaggggtgtcttaaattaatccctataatctaatgataattcttggccgcaacatgtgtcaggatatcaaattaccaaaggaacaacctgagaaagttttaagcactattgaacttattgtaacgcttatggatggtcgggaagtaaaagaatttttcacattatttcctccaatcaaatactacatcgacgatgggacatggaactatgattccacattagaaaaaatgaatagcttaggcgagcgattcacaagtgatagcttccttacattactgatgtcacattgctatgaaaatcgtttcatcaaacgtttaggagtaggttttatgtctgccactagcaagatttataaaagacagcacggaataagtgtaatggaaaaactttgtgtagagaacggcatccgtgtttatgaaaagaaaggtaatgaaatcaaacctaaattttatcgagttaaataggactaaggaggacagttgaatgaatcaactgcaaattttctcaaacaaagaatttggaagcttaccaattgtctacattgaaaataaagtttacttcggagctaccgaaactgctactactctcggatacgcaaacccacatgacgcgatttcaaaacactgcaaaaaagagggggtcgcgtttcacgaggtcctttcaaacggtggaccacaacgaaaaaagttcataaacgaaggcaacctataccggttaatctcaagatcaaaactgccgtcagccgaaaaatttgagtcatgggtatttgatgaagtcatcccgacaatcagaaaaacgggcggctatgtagcaaacgacgatctattcattcagacgtatctgccgcaggctgatgaacaaacgaaacagctttttaaagtcaccctgcacaccatgaaagagcaaagcaagcagatcgaaacaatgaagcctaaagcccttttcgccgatgcagtcgaagcgtcagaatcatccgttctggtgggtgagttagcgaaaatcctcaagcagaacggcatcgagatcggccaaaacaaactattcaaatggctgcgcgagaacggctatctgattcgaaagaaaggtgaatcgtttaaccttcctactcaacgcagtatggatatggggctgttcgaaatcaagaaaagcaccattgtaaacggcgacggatcgatcagaaccacacgtacgccaaaggtaacgggcaaagggcagatttatttcgtcaataaattcatcaagtcgcaatctgcctgatataagaaacgaaattgagctttaggaaaagaatttggtgagtccatttttggactgtcctctttaaaactctacagaacaaagaattaccttgttttacatttggaagaaaaggagccatgcaaatagctttatgacttaatcatacatccataatctgtacagaaaaatagagaacataggacaaaggagagttcaagaatgccggaaatagtgtctaaatcactggcgcatctacttgaaacgaagaacatgacaaacgggcaactcgcccttgatttaaacgtttctgagtcgatggtcagcaaaatgaaaaacggaacaagaaaaatgccgtgggatgtggcggaaacgtcgctaaagaaattcgatcaaccattttacgcaatgggaatcatgaacaaattcagcgacggatgctcaccgccagttttcactggggaatcagtcgaacaacatcgactggcttttgaggagatcatggtcacacaggcgacagaagccattcagacacttaatgaggtgagttttgttaagaatccgaagctgatctctctggaagaaagggagcgcattaaagtggtcataaaggaacttctggacgtggaggcatgggctaaaaacttagcggccttattggcgaaggaatacaacatttcactcaaagagtgctacaaaaaagcgactatcacatggaaggcgaaagggtggcttgaatgaatctgaatcattttttgaagtctgacagggagaaggctgaacgactttacaagtcattgcaatttctcgtttctgaactattggaggatgccgtcaaagagggtgattttgatgggtgtatagaacttgcgggtagcattgccgaccatagcagagacttaaagaaaatgcagcatcctgaaaaagtagtggaactacacgaaatagcttctgagttcgcgaaaaggggattagatgttaagccggtaaggagggttcattaatgctccattaccttcacaggcgggcgacggctttcgaagtaagggaatggtgtgcaagaatccgagaccaccctgaattgcatttgtcatgggatcagtatgtcaagaaatctatgaaaggagatttttctaaatgaacatagaacacccaattatcacagaaattaaccgttacggctatccaaaggattatttgcggtatgaagaagaggaagaaaacgaagacgacgaggcataaaaaaagaacctttaaaaaaggttcaacaagatcaaataccaagtgttgaattaattggctggtggaaaggcgtagataaacttcccaaatacaaattatatcagtcttccacctgaaaaacaataaggaaggtgctgaatgatggctgaaatcgaagaaatcaaaaaagatttaatggatgcaatgccgcaggaagaagaagggcctgaaatatttgaggtgcatgatctagaaacagcgacagaggcgcagcggcgtgttgcttacttcaaaagaaagcaggctgaaatagatgaagtggccgacaagcaaatagaacgcctcaagatgcaaatagaacggcttgaacactggcaagaggaagcaaaaaaggaatatgtcgagcgtgaagatttctacaaacaccgtcttgaaagatacatgcgcgaggaagtcaggaagatgcaagagaacggcaaaaagccaaagaaaaccatcaagctgccttacggaacgatcaagcttgttaagcaacagccggaataccagcgaaacgaaaatgatctgctggagtacgcggaatctaaggggtttgtcagggttaaaaaagacgttgattgggcggctattaaaaataaagccaaggtgttcggcgacaaattaatagatgcagacggcgagttaattcccggcgtaacggtggttgacagggaagacaaattcacggtcgaggtgaacgaatgatgaacatttatcaaaagcttgtcgaagtcaggaaggctgttccttatttaaagaaatcgaatcaaggtcatcaatacaattacaccggttcgagtcaggtagttggagcaataagggagaaaatagatgaactggggttactgctgattccggcaatcgttgataaaaaagtaacagcggagaagaacggaaacaggatcacatattttactgaactggacatcgagtacacctgggtaaatgcagagaagccggatgaaacaataaaaaccactttttatgctcagggtatcgacatcggtggggaaaaaggtgtcggcaaggcgctgacttatgcagaaaagtatttcttactgaaacaattcaatgtaccgacagaccaagacgacccggacgcatttcaacagaaagttgagtcctcaaagccgccggaaatgatcacgcaggagcaaaaggatgaaattcaatcactggcacaaagctatgttgaactacgcggtcagggaaatgtgaagacggttttgaccgccttgaatgtcatggatattaacaagattcaaaaaggtgaagcggataaatgtattttccagcttaaaagatgggttacgaaggcacagaaagaatctgcttaaaacatcaagaaaggcggcgcatcacgatgaacaaaatagcccgcaaatgggcgcggatgtcgcggaaacagcagcagagaaccgagaatatcgcggccgtcgtgctggcggccatcctgttcggttggtatgtgttcatgggctttatcatcatttcactttgaagggagaagcgttccatgtggggagtacatcaaagattggcagaattatggaacatcgagaaaaaccacagggcattgaccgaggaagaaagggcagaattaaacatctgcttggatgcaaatttaaacctttgtcgaaaggtggcgcacctaaaaaaccaatctttacttgcgactatgacaaaggataacgactggcagtttgaaatatgcagccaattagaagaaatatatacggttttccattgattattgcaggaggggaaagatatgaacattccatggagcaaagaacagttaatgatggcatacaaaaaacttatggccgaaaacacggaattaaggagcatgtgcttgtggtcaatcagaagattacaccctatgtataaggaattggcctacgtcgactacgagaaaatcaccggagaaaagccaaagagagattaacagatcatcaagagacggacggagaaaaggaggcagaggcattgaacggtttgctattagacgaatatcccttgattgtcattccttctttagcaaaagaaatcggattgaatgaagcgatcgttcttcaacaagtccattactggttaaagtcatcaggtaaaaaaagagacggtcgaaagtggatttataacacctatgacgagtggttggagcagtttccgttttggtcaaaaaatacgctgatacgaactgtagaaaaacttgaaaagtccggcatattgatcacaggaaattacaacaaagcgaaatacgacaaaacaaaatggtactccatcgattacgaccgactacccaaaatgggtagagggtctacccaaaatgagtatagcgactacccaaaatgggtagaccggtctacccaaaatgggtacaccaataccagagactacacagagactactacagagactaacaataaaccggataaaagtgaaaaacaggacatcagtaaaacagatgcatttcaaaatgaactggaatcggttggtcttaaatctataaatctttcaagtttagaagagattgaaaaattaacagaactgacaattcaaaaagagactctcccagcagggattaaaaaaagcatcttagttcaatatcttgactgcctccgtcttactcgaacaacaggcaaaatatcggccaacgtcataatgactcatcttgaaaaaatgagcaagtacagtgtcgatcaactgcattacgcaatgtggacgcatgtcgagaaatacaacgaccgacaagaaaaatacacgcttggcattctgaggaacacggatgaccacaaagcgcggcagggcctcatgaaattgatgaatcagggaggtacaaggaaaggtgaacagtttagaagataccctaaagcagttggagaaatcgaatcccggactagcgaagaggttgaaagactcgaagcgcttgcaagagcaaagggcttatccggaaagatacgagacactcactgtgatttctgaggaaaactgcatttacaagcaatgcgacggctcggggcttatctggatcaaagaccatcaagaaaaccgggaattcatgaaagaatgcccctgtaaggctgtcaaactattagaaaaaaagctgatgggcgcccggctgccggaagagtttaaagacgtaacattaaattcttttgaaatagatgtctatgaaaatgacgaatcgaaggagcgcgcggcgaacgcaaagcggatttcgaaaaactatgtattgaaattcgagcagatgcgcgagcaggggaaggggttgtatttttacagccatgaaaaggggagcggcaaaacgaggttagccgcaagcataatgaaggccatcaccaagatgcacgacaagccggataatccattgaaaatcatttattcctcaactgcagatctgattggagagattaaaaagacctttgaagctgattcgaaggttaagagttccgacattatcgaagcggcaaaaacggccgatctggcgatcttggatgatatcggagtagaaaaagcgacggattgggtagaagaaacgtttactcgcattctggactacaggctccagaacaaaaagccgaccatcttcacaagtaacttagccattgacgaactggatttgaagtatccgggcggcaggatcagcagcagggttgaaaagctcgctttccctgtaaaaatgccagatgaaaaagtcagaagcaagatagctaaacaggaaaacgaggagttgttgcaactgctttacgaataaacaaaaacaccgaaacctaaaggctccgatgctttatgaactgtgggtaattcaattatagcacactgggggcggtttgagtgaagccgaaaacaataactatcaatgatgatctaagctttactggaacgatggagaaaggcaaaatccgtgtaattgttgtggacggtaacaacgggacggcatacgaaacggacgccccggaacatgggaaaacaattattcaaacgataaacggcaagtgtaaacgtgttgattacgaaataggccacaaactcgattaaaggaggattcacaatgtgcagcttatgcaacggtcagaaggttgttagggtagaaaattccagcatggtcgcattccatgcctgcccgaattgcaagattgagaagcaggatttaacagacaccatccagcagcttaatgcgatcattcaaaaacggcagcaggagaagagcgcgtaacgcgggatacgcgaaaggggagcatttacggtgacaaggctaaatgtgggtgattgggttaaatttatctcgaaatcagtcataacttcaaacggtttaattattgagcaagagattaaagggtatatcgacgctatcgacgggaatcgcgctaagatcagaggaaatgacgggaaaacatatgtcggcgagaaaatagaagacttaacactttgcaaagatgcaccagaatacacgcaggaaagcctcagaacgatgataaacattgcactcgatacaaaagaccggaactggtttgaagagcttacaagcgaattaaaacgcattcaggaggtagagggatgagcgaaaaatacgcggtgtacgacacattcacaggcgcagttgaattttacgagaaggaagaaactgccttgaaagattataatcaggcgtcaaaagacatatccgaatttttggacagagaagacctacccgaatatgtctatctattccagatcgtcaaacgggaggaaataaaataatgcaaaaaatcaaaagactcatcgtccgactgatcgggcggaaaaagaaggaacagaaaaaagtgtttgaatggtgggatttgatatgagaatcatcaaaaaagaagtcaattcacagtacggcggactattcaaaaaggtatttattcgaaaaatggttaaggaaaacgaccgcgaattgatccaagaaacaagtacgacctacatcgtgggtatcccggttagatcggtgacggaaacgcgaccgccgagtttgaaagacgcttttaagcaggcgtggggatcggcgaaatgaaagaagtcaaagcgctgctgtcgatcatactacaggccggatacagggaaaaacagatcgaacaatggttacaagatgacgggaggtaagacggaatgagagagattaaatttcaggcttgggatttagacgcagaacaaatgtataactgggaaagcattagacaacactttcatgaacatttagatcatccaagggtaaaggtaagacaatacaccggattaaaggacataaacggacgggagatttacgaggaggatattacacgagatgacgacggtttcctttggaaaatttactgggaagacggttcgttttgggctaagggtggagaatttaacctaagagaacagcttatagagttggcgccggatttttgcgaaatcatcggcgacgtatatcgaaatcctgaactattggaggcggcggaatgatcacccttaacataccagtcgaaccaatgggagccgttcggatgaccggacgcgggaaattcgtgaataaaaacgcacagcggtatttagcttataaggatttcataaagctgcacgcacagaagcagatgaaaggacagcagctttataccggccctactgtagtaaaggtgcttttctcgatgccgattccaaaaagttggtcaaagaaaaagcaacaggaggccatttcaacggtacacatcaaaaagccggacatcgacaatttagtaaaaggtgttttcgacgctctgaataaaacagcgtggcatgatgataaccaagttttcatggtcataggagccaaagtttacggaaaagaacccgggatcgaggttcaaataatggggctggcagaatgggaaaatttaagcgcctgatcatccgttataaaaaccaatacgggcgcactgtgggacacgacaccctttggaggggtttagatagcctcatagagttaaaacgtcgctacggctttttaaacgaagatttggagcatgtcaagattgatggaagagtttgcgatttgcaggaggtaagggccgagcttgagaagcacgggtaaaaaatttcggctgagaatgtcgattcctgtcggaaaaagacgaaaggaaggtcagtggtgaagaaaatatctaatgtttggacagtagtttttaaggaaaatggctgcgaaccattggcttatacttacacatcggaaaaagatgcaattcaagcaaaaacaatgattgagaatagtaatggtcaagaattaataaatgagaaagaacaaattgttggacggatatcattggaatggtgctatttaatcaacggaaaattaatagaaccaaaggagaatgcaaaagatgctgaatagaacggtacttgtcggaagattaacaagagacccggaactaagatatacccagtcagggcaggcggttgccagctttacattagcagtcaatcggactttcacgaatcagcagggagaacgtgaggcggactttataaactgtgtcgcttggagaaagacgggtgaaaatattgcgaatcatctgaaaaagggatcaatggcaggcgtagacgggcgccttcaaacgcgaagttatgacgatcagagcggccgaagggtgtttgtgacagaggtaaacgtcgaatctgtgcagtttctcgatccgaagggcggcggtcaggctgatagcaggcagcagggcggcgcagggcggaaccagagcagcgggcagcaggggaatagctttcctgatgatccgtttgccaatgagggtaagccgattgatatttcagatgaagatctccccttctaaggaggctgcggcatgacaaggcgcgttgttcagtggtcggccacgaattacgaccaggaagagttgcaggtcattcaggttttcgaggaaggcttaagcaaacaggatgttaagagggaagtgccgttcagcagatggcacggcgttctatacaaaactgaaaggggaaacggatatgacttcaaataaaaatccaagattaccgggagaagtgacagtttggaagatgacggaggaacagcgccttgcatacatcgagaaacaccccatcgtggcgagtgatcagcatttgaagtattgggattgggacggcggaaaaagaggtgagcgccatgtgcattcttgacgaaatcggattcacgccggagcagtattttgagttgaaagacaaaagaatgacagacgaggaaattgcatgggacgaattagatgtcgcgccctggcatttgaaacaatggaagaaaaagcacggcgtcagaaacgaaaaaatacgccacggaaagaagttcactcgtgaggaatgggaagagaagcgaaaagaagggctgacagaaccggaaatcgctgactatttcggatacaaaacgttttctatctacttgagatacaagagaagtctcggcatcccgccaatgacaaagaaaatcgagcgcacgccggaattgctggccgaaatcaaaaagtatttggatcaggggcttttgatcaaagaaatcaccgagaaaataagcgtgaagatgtccagtgccatggttggcagaatcataagagaggaagggctgcatgatgagaaacccgataataaaaagcgtattcgagaaaatagaaaaacagcaagaaaaggggcttgagaaatacggaaccgaggtcaaaacggatttgtacagcttgcggggatggttgcagcacgctcaggaagaggttattgatttagcggtataccttgaggcggctatacaaaaattcgatgaattagagaagaaatttgatgaattagagagggagaaggcatgatcatagcattcaaaatcatcctgctgctcataattatcttatcgtttttgggagcggtcggagagagggaaaacaaaaatctacgggataacatgacagctatctgcataacatcaataatcggttctctcgtcgctttcatcatgatttaagggggaagatagggtgaagagtttaaatgtgatcaagggctgtttaatcgctcttggcggggtatttatgatcgggtatcagtgggtataccggccgacactcggagaatctgcggcaattatcgtgttcacccttggattagtgtttgcgacggagatcagaaactggttttacagcttgatcttggttctgatcagtgcgtttgccgtcgtcctgtatggatacatgtatctcgaaaacttcaaacaactgcttgtgatgctattagtctctttgccaatggtatcagcaatattcttgcacgtggcggagcatgatgcagagaaataaacatcggcgcgagccgggaagggtaataactcatgaaaaaactattcaaaaccattgttacactgtcactcttgatttctggaacgcttttattctcacaatctgcggcggctgtctggtcgccgtggcaaaaggaagcattcggccatacagcgaggattttcaccgacgacacgaattactattcaggagcgaaaacagttgactggcgggcggaaaagaagggttctggaacgctttactacacggctggcgtctataaaaaacgttcgggcggcggcttaactgatacaaaccttgtacagcggggatacttcaagaactcaacgccgttaaagtctttcagtgtcaacgaaattcggaagcgcaccgggaaagggtcatatgtcattcagcttgattgttatacggatgcgaagaaaaacaactatgtcgggacgtttgaatccaagacgttttatatcaaataagggggctgcggccctcttatcataaatgcggcggccgtcaggaaacatttaaactcggttttatggtatcataaaggtataacgaaaacaaaataatcgtccaagacggaaagcctgcggacactgaacttacagcatttacgctgtttgtttggtgtccgttttttatttatatacgataaggaggaaacggacatgaatagaaaagagatcgaaagcatcttaaaggattatcggtggatgatgaacagcattcaagtcctgcgcgaatccttggaggatgccggcgaagggttaacggcaaaatacgggattgaggcgtctttgccgaaggcgcaaggcactacgagcgatcctgtatataacgaaactatcagaaggtcgaaacgcttcaaaaaaatcgagatatacgagcagaaagtccagaaactgcaagaacgaattagccggatttcagacgaacgggaaaacgaggttttacactggctgttggaaggtaaaagttatcggtggattgcacagcatatgcagctttctttctctcatattcgcaacatccgagaatcaatcattgataagctggccgatgaatcaaattgcacgaattgcacaaaaggcacggatttaaattctttgaaatctgtgggttaaaatagagccaaggaacatccctactatgtttctttgtttctcgtttcttcaatcgaaccttacaccttaactatgtacagattggcggcactgcgaatacgcggggtcgctcttttttatgcggtggcggaataggtagacgcggataacctcattacgcaaacaaagagggcaggcaaatagccaaaaaagcaaagtttgcatgcaaggtgcaaatccttgcccgcataccagactatctaccatgtgtagaaaagtttccttgaagcgtgtgaagcgtttcatgcaggggtggcggcacatggctagggtgtcgcgagcggatatgagtgtaggtcgggtcaagatccgcaattcgctatgaattcgctattatgagctcatctgccatgtgcagaaggagaatcccgaagtacgtacggcgtcatcgggttttagggttcggggttagcccggacggacatattgccgataaggcctttgctactaactactttgtagggtgaactcgtcacagccttatcacgggcggcaatagttatgggaaagcggcttgcatgacgcaggtcgctttttatgtttgttgtgatatgcgtccggaagagggcgggcaagttcctgccagtacgggcgcagctcagagcaaataaaggagaacaaagtcatgaaactgctacgaataaaaataagcgcttgggtggctgtgcacctttggggcattagcccttcaagatactttgtcgatgacgaattcagagaagcagttgatcactttcagaaaagggggttttgaacatggggaaggttacaagggtgtatccggggcctaacaacgggctgatccggtggattgaagaaaactttggagagatcgacggatatgcggcaacgttcaagatgaaagacggcacgacaatgacgatttacgacgcattaacgccagtcgaagccgtgggaatggctgagatcgggaaaaacgtgattcaggaagcaattaacgaggatgaatttgtctcgagaccataaaggcggtaatgattatgattctacgacaatacttacaggacaaacgagaagaagaacgcgagaaggcgagagaatcggcccgcaaaactcacaagtgtcatgggtgcgtgtgggggacatggtccgggaataaatacgtctgtccgtttgggcggtgcgtaaaaccaaataaggagtgatgacgagtgtctcaaagtgtcagattctatgacaagaccaatgatgagtttgtgacggtgacaaaagataacccgttaccggttaccggcgcagggggcggtgaaacacagagtgttgatgtaaacaactggccgaccacgcaaaaggtttccggaagtgtgggtgtaaacaatcatccaaaatggcaggcagtcggcgcgatggtccaagggcaagtggcgacaggagaagaaaaaatgattgatctgtctgcggcaggcgttacattcatcgaaatccaggcatccccggacaatacagttccgttaaaggttggcgatgtctcgggatttacagccttttgggttaagccaggagaaatgcaaaagttctattacggaaaaatctatgtatcccattcagcagatgcggcgcaagaattcgcttatcaggcggttaaatacggatgatcaacaacaatgaatggctggaggcggtgaggatgtagtgagtaaattgacgccgaaacaagaattattcattcaggagtacatgaaagatttaaacgcaactcaggcggcgaaaagagcaggatacagcgagaaaacggcctatcgaacaggcgcagacctcctcaaaaaacctcaaattctcgcgcgtatagaagaaatgaaagctgagcgagccaaaaggaatcaaatcgacgccgattgggtgttgcaaaacttcatcaaggttgctcagatgtcaatgaaagcagagcctgttatgacttttgattacgaaagcaaggaaatggtcgagacaggcgaatatcagtttgattcagcaggcgctaacaaagcgcttgagaacatcggaaaacatatcggtttctttgataacaaacacaaattgacggaagcgcagatagaaaagatcaaagccgaaaccgaactgacgaaagaacgcatcaagctgttgaaaggcggcaagggagacacagcgcttatcgcaaatgttgctgaactgttcaaagccatgaacaaaggtgaaagcgatggaaattaagttttcaccaaaacagcaggaaatcataacaaggccattcgatcacacacttgaggccaacgaaggaacgccccggtctggaaaaacgacagcggggcattttcgttacgcgctttatttgagcctgacgccggaccagaaccatttaattgtggcctataaccaggagcaagcgtacaggcttttcattgacggagacggaaccggattaaaacatcaatttgggaatctggcaaaggtcaagcatgacgacttgggcgaccatttagaagtgcagacgccatcaggcataaagaagatttactataaaggcggcgggaaggtagacagtgtgaaagccatcacgggtatgtctctcggctctgtcgtcttctgtgaaatcaatctgctgcatatggacatgattcaagagtgtttccggcgtacgttcgcggcaaagatgcgctatcatctggctgatcttaacccaccagccccgaatcatccggttatcaaagacgtgttcgaggttcagaatacacgctggacacattggactatcgacgacaacccgattttgacccccgagaggaaacaggagatttacaacacgcttgtcaaaaacccatatctcctgaaaagggactgggaaggcaaacgcgtaaaccctcaaggcgttatttatgggatgcttgatctcgaacagcacacgacaaaaacactcaccgggaagccttttcaaatgttcttctcggctgacggtggtcaatctgatgcaacgagcgtctcttgcaacatcgtaacgatgattgacaacaaaaaggccaatcggaaggaatacaggctgaatcgcgtggctcattattaccattccggtgccgagacggggcaagtcaaggcgatgagtgtttacgcgaaggaaatcaaagattttgttagatactgcactgaaaaatatcagatgttttatgcggacttctttgtcgatccggcctgtaagtcattacgagaggaattgcatttactcgggattgatacgacgagggctgacaacaacgcgaaggacatcaagggaacatcgaaaggcattgaggtcggcattgagcgggcgcagaacgtactatcagaaggcttgttcttcctggtcgatgatgacaaattcgatcattaccatttcattaaggaaacggggctttactgccgggatgacaacggcaagcccatcgatgagaacaaccacgcaatggacgaattccggtatagcgtgaaccatttctataaaacttatgtgatagggggataaccatgaaagaaatcaaaatcagatcagcggaatttcttggaacggattctaaaattgaatataaaaatgaattaattgacgtttgcagacgtatcgtagaacatctatccggaaacgaagaaaaacatgatgccaaaatcaaagacctgacagccgacacgattgaagccgggacgataaagcccccatcaaacaagcccgatgcttttcaaaccttgaggaagcaagctgaagaatggagagagcaacagcagaagcgtcatgaagaggaaatgcgggaactggataaccttatcgaatgtatcaaattcataaaaagacaaacctctaacccgacagaagataaagaagccgatttcgaatattttgcaaggctttatttggatggaattatcgatatgggctatttcaaaaaacaagtattcgagatattcgaaaaataaggcggtgaaacaatgttcaagggcctagtcgcaaagataaagggggtgctgcagaaaatgggcattatcaacgaaatacaatcaataacagacttagagggcatcccggcaacggatgccttttatacgtatatcgaaaacgtctggctcccactgtatcagggagagttaatgaattacaaagatgagcctttccacgaaatcgaatatacgacaatcggcggcggtaaaacgaccaggcgcatgaagagcctgaacatgccgaagacggccagtgaggaaatggcgcgcctcattttcaacgaacgatgcaaaataaacatttctgacgatgcgacggccgcaaacatccaaaacgttctcgcggacaacaatttctataaaatgtttcaggatcaccttgaatacatgtttgcgcttggtggcatggttatgaaagtgtacccgcaaacagaccggctcggacaaaagaaggtcaagatcagttttgttactgccgactgctttataccattgtcttattcaaatggccggattgaagagggtgtgttcttgagcacattcaaaaaaggcgacaattattatacgttgcttgagtggaaccgttgggacggtccgaaattcgttgtcagaaatgaattattccaatcgtccgatgaaagcacgctaggaacacgagtccctctgagtaccatctatgataatctgcagcgcgaagtcgtatattccaaacttacgcggccgacattcatctatacaaaaccgaatatcgcaaacaatatcgatctccaatcaccgttgggtatttctttgtttgcaaatgcgattgatgatctgttgattttagacacaatttacgacagtttcctgcgtgaattcaggctcggcaaaaaacggattattgttccgtctacggcaattagctatgtcatagatcctataacgggtgagcggcaccgttattttgacgcgaatgacgaggcatatgttgcaatgagttttaaagacgtcgataatcaaaagattgttgatacaagcgtcgagttgcgcgttgatgagcacgccaaagccctacaaactcaattagatgttgtatctatgaaattagggttcagcgccgggacattcacttttgatggacaagggctgaaaacagcaacggaagttgtcagcgagaacagcaaaacctataaatcgaaaaacagccacgaaacgattatcgaagaaagcttaaaagagctggttacaaccatttgtgaagtggcagagacacacaagattttcacaccggcaaaagattatgtcgtaactattgattttgatgattccattgtagaggatcgagattctgattctaatttctggctcaagctgcagaataacgggaacattccgaaatggtacgcactacagtacatccttaagattccgccagaggaagcgaaagaactcattaaggaaacccaggaagagcaagcggatgaaatgccggacattgacactcaatttggcggcggtgcttaatggcacgcttgacaacagagcggatggagcagataacatggcccatcgttcagctgtattcagcaattcaaaccgaaatcctagagagtgtcgctattcgtcttggccatcataaagagttgctcgaccagaacataaccgagtggtacaacatgaaaatccagcagatcggcggactaacgaagcagaatatcgaaattatctcgaaaaaaagcggcctggctccaccactggtaaagaaaatactgaaagaggcaggctttgagggcatcgaccaaaacgaaaaggtgctgcaggatgcacttaaacaaggtgcggccatcatagcagcggcacccgtggcacaagacccgtccatttgggcgattttagacgcgttcgaaaggcaggctctggattcattcaacctgatcaatacaagcatgttaacgggcgcgcagcaggtttatatcgacatcctgactaaaacacaagccgatgtattaaccggcttaaaaacgccgcaggaagccctcagaaccaccataagtaaatgggctgacaaaggtattcctgtcttgagaaaaagagacggaaaaaaagagtacgccgaagcatatgtaaaccgaatcatcagaaccaccacaaacaacgttacaaacgaaatgcaggacatgcaggacgcgcgttttgatagttacggcattgatttggttgaaattagttcccatattggcgcccggccaaaatgcgccccatatcagggaaggatattcagcagaagcggtaaggacaagaaatacaaatccctatcaagcacaagcataggggagcctgacgggttatttggcattaactgcggtcatttccaatacccctttgtgccaggtatatcagtgcagagatattaccctgtagacgctcagaaaaacgccgaagcctacaaaaacagccagcggcagcggagccttgagaacaacatccgaaaggcaaagcgagaattagccatgtgtgaaaaagcgggcgatgaaaccggggtaaagcaggccagggcgaaaattttgaagcgccaaaagcgaatgagggaatttatcgaagagacaggccgcactcgacgccgggagcgggagcaaattttatattagggggttccgtgttgaaacttgtaattcattttctattaaaccttttgttgggtgttttttatttttatatcgcgaagcccgtttcttcttttgaagtaatgatagtctcgcttgtttttatcaatggctttgcttggggtgtgaatgccgcaattaaagagaaggggcgtaaataatgttcatttcaaggaagaaatatgagaaaacgcagcaggaactcgaccaattaaaaagcgatgtcgaggatttaaagaaagtggtccgtgatttactattaagccaaacaaaaagaccagagacgaaaaaagagcctacctatttgggataaggctttttattttggggagggaaaatatatgaaactatctgagatcgtcgaacaattgaaaggctgcggctttgagtgcgaggctgggccgttagaaaacaatgtcccttttgttgcattggagaagtttgcgaatggaaaagccggaaaaataagtgacggctatcatacttttgatgaattgtatcatcaccgaatgattctattttcggtaatctgcaatcagaataaaaaagaagcatggaagtcttggaagcacgatgatggcagtatgtttgataattatttcatcgttggcatccatacacctcaaggtcactacacttaccattatcataaagatcattgggatttattcgatgttaaagaattagaattggcgcctaaatgggatggtcataagccggaagatatcacaagattattaacactttaaaaagtcgctgaggcggctttttttcttgcccgtttatctgtagtgggcggtaaataaaacagaagtttttacccattcgggaggttttagtatggataaatttttaagactggacttgcaacatttcgcagaaggaggcgaagacggcgcaggtgctacaaataaccccgatccggcggccaatccgggaggaaatcagcaacaggaacctcagcagcaagaaccaacgcaacagcaacaagaaaagcttttgccgcagagcgatgtaaacaacctgattgctaaggaaacgaagaaagcacaagagaagctattgaaacagcttggcatcgaggactttaagtctgcaaaagaaggcctttccaagtttaaagagtggcaggaatcgcagaaaacagaagctgagaagatggccgatagcttgaaagattatgaaactaaatacaataccgctttaagcgaaaacgaaagcctcaaggctcaaatcgcagccatgggagctggtgtgcaagcggatgcggtgcaggatgttgtgacgcttgcgaaaccccttgtttctgatgaggtggatatgaacgcagccattgaaaaggtgcttgaaaagtacccacatttcaaaggtgaagccggtgaagaagatgacacagcattctatactgtcggcgaccacaaaaaacaaactaaaacagattcattcgccagcgctttgtttggcaaatgataaggaggaatttaaataatggcaaacgctattaactacgctcaaaagtatactcaggagttagaccaggttttccagcaatcaatgcttacaacagaactcgaaacgcctagcgttaattggttggatgcgaagacgtttcacgtgccttccatttccctgactggctataaaaatcactcgcgtaacggcggtttcaatcgtggagacgttacaactacgaacgagccgtatacactcagctttgaccgtgacgttgagttctttgttgatgtaatggacgttgatgaatcaaaccaggcggcaagtgcggcaaacatcacacgtacttttatcactgaacatgcagcgccggaaatcgacgcttatcgcttctcaaaacttgcgacaaaatcaattgataaaaaccttgcaactgctgaggatttaacgaaagatactgtttaccctgctattaaacgcgacattctaaaagtccgcaaatacggcccagcaaaccttgtttgctacatttcaagccaaacaatggacgcgcttgagcagtgccaggatttcaaccgacaaatccaagtgcaaaaccaaggcacagccatcgaaacgcgtgtgacaagcattgacggcgttcgtttggtcgaggtttgggattctaaccgtttccatacttctttcgacttcacaactggattccaaagcgcgacaggatcattcgctcttaactggatcatcgtctataaaggctcaatcgtcgcaaaagtaaaacaaagctcaatttacttgttcgcgccagggcagcacacgcaaggcgatggatacctgtaccaaaaccgcctatatcatgatcttttcgtcttgaaaaacaaagctgatggcgtggttacttctcacgtcactactgcacaagcttaatggaggttgataatatggcaatcttgagaaaagagaatgtaattttgcgagaagatgacacgggaaaaatcgaagaattgaagtttcaaggctatgaagaaatcaaagaagaagatttgaagcctaaaaaagcagcgaagaaacaggaaaaagcagagaaggaataaaacccttctctcttttttatgagagggggcatgatgatgccttacatcacaccggactattacaagaatgtctataaaggcgcgcaggcaccaagcgataccgatcttgagcgctatattgagcgggcaagtgacgtcattgacgaggtgacggaatacaaactatacggcggcaaattcgaagcattgccggatggtttcgtcaaagacttagtacggaaggcgacggcggcacaggttgaattctacgtcataaaaggcggcgatgcggccgtgaacgcgggagaagccagcggcatgaacagtgtcagcgtcggttctttcagctattcagggggcggatcgagtaactcaagcgcctcgagccgggacgccgggcgcataagtccggctacgctttccattttgaacgagacgggccttttatatcgtggggtgtttgttcgtggctaaaccaatccccgaagagttgctgatacattctgtgacttttgaagaatatactggccgggatgacggttgggacgacaacacagcggaacccgtcacaatcacgaaagtaagagtcgaaccaatcaccgggattgtacggaataacgtccgtgacgacgtggaagggcagtctatagtctttatagatcgaacgcattcaaagcccttcaaacggcctgcagagcgctcaaaaatgacgtttaatggtcgcaaatacgagatcagcaaaatcaaagaatgctatgacgagaacccgggtgctccacatcactatgaggtgatattgacatgagaagtaatgttcaggttgatatcgggaatattccggatcgagtcgaagaattcaatcgcgaggcgcaattcttattgtcttctgaggtgctgaaagattccaattactatgcgccgatggacacgggggcattgatatccagttcggaacgtagttcagactttgaaaacggtcgcctcatatgggacacgccatatgcccggcgactttactataatccgcagtataaattctcaaaagacaaaaacccgaacgctcggggcttgtggtttgaagcggcgaaagcggcctttctcccacgttggatcatgacacttgaacgactaaaaaggcgctcaatttagggggtgtattggtggatttcttgaagcagatgaaaaaatacatcgaaacgaatatccctattttcaaaacgtctttgtcggtcggagccttgaccgatggagagataacggggaatgatattgccatcctcccgatccccgcgacatcgccgaacaaaaaccttgattctggccaaaattatgtttttccctttcaaatactggtcaggcatgaaaagggcagcctttcatattcaacatgccagattatcgcggattatttaaacagcttatcaaacggagcggtcacaagtgcggacggctcctttgtttttgttacgtgtgatctatacgtgacacctaatttcgtggaacgaacgaaatggggcgacatatacaccgccatgtttcgggcggaacttgatattttaaggagtgaatagaatggctcaaaatgaaggttttttgattcaatcaaaacataaatttcacatcgatactacgccagatgcagccgaaccaacatatgtaaggcttgcgcgcggtttaagttcttttgaacctggtgggaacgaagacaccgaccaaacgccttatcttgacggcggcggccttaaatccacaactgtaatgggtggacaaattacattaacttttgaaggccatcgttattacggtgacccggcccaggattatattttcagtaaggtggctaaattagacgaacgcgaaacccggtttaaatgggaagagccggacggcacactcacagaaggctcagtaaccatcgcaagtatcgaagggccgagcggtgaagcgggttcaaaaggtgaaatctccgtcgagatccatttcaacggaacgcctactattaccgaaccaacagttacaccctagtgcgccccagaatctacagtacacaagtacaactgattcagttacggtgacctgggatgctgtagaaggggcgacatcatataaggtatataggggagcggacaaggttttctataaagaagtgacagaccctacatgcacgcttacagaaatcgcgccggatacacttttaacggtaaatgttacggctgtaaattcggccggagaatcaccaatgagtgcgatttcaacccggacacaaccatcagcataaaggagcagatttgctcctttttctttttgaaaaattataagggggcttttacaaatggcagttatcaaaattgagttagacaaaccggtacaggaattcgaactcggaggcaaggtgtttgaagtcagatacgacgacgagagcctaaaaagctatgaaaaagtgtatctgaaaatgaaaaaggcttatgaagattatgaaaaaattaacgacttggcagctacagaaaagcaactgcaagaggcagagaagaaaatgactgctttagtcaaagaactgatcgaattgtatttcgggaaaggcagctttgatcatgtttatgaagctagcgggaaatcaattctaaacgttcaaaaagtcgcggcatttgtaatcaagaacctgaacgaaaaggcgactcgcgatcttgaggataaagcggcaaattacctgaaaaagtagtgagcgttcatgaaactgaccgaccgattcgagccagatgtcataatttttaaaggcaaaaaaataaatttgaccctttctttcgatatcgttttgcgcgcgttcgaactgttggaggacgatgatttcactaagccggaaaaatgggttttgcttgcgcgaatgttcgctgaaaatgaagaagatttaaacgaaatggattttgatgacatcaccttgtttgtggatgccgttttcaacaatttcataaacgagtcagaagacaaagaggaagaacaggccccgcccgatggcgaagcaacagaagcgccagcggacgaggctatttttgatttcgtggaagatgctgaatacatttattcggcctttctttttgattacaacattgatttgctcgagcaacaagggaaaatgcactggcggaaattcaaagcgctattcaaaggattgagcagcaaatccagatttaaagaaattatcgaaatacggacagcggaagttccgaaagccacaaaagacaataaggacgaaatcgcaaaaatcaagaggctaaagcgtgcatttgcgcttaaaaagaaccagaaaagcgcagaggctgcggttgcggcgttagatgcaaagcttgacgcgtattcgaaaagaattaaatccggagggaggtaggatatatgagcgatggacgcgtggtgattgattcgatttttgaaacaaggcaatcagatcgcggaatccgaaacctccaaaggtctttggatggccttaacaccaatcgatacaacgaacgtttaagactcatgtcagctgaaatgaaagcggcttttcgtgagtctcgggcggcgcttattccattcaaacgacagttgttagaaactgaattcaatttcttcaaactatcgcgcagtatggggacttacacaggaacgaataagcaatttatggcggctgttcatcaactcggcctggaacacaaaaaagccaccgaggaaatgatgaaaaacaacaatttaatgaaagccagctttattcagtctgtcggaaccatgctggcgcgcagtggacaaagtgaaaagatcgcggccaatttctcgcgcatgggaaaccctttgtacactgtgaataatggtttactgcgggtgacgtcgaaccttgaaaggatggcacgccaagggaatgcggcggttctggcattgaaaatgctcgggcctaacgcaaacatgaaagaattaaacgatatgacaagaatgatcaaccaggggttgatgagatatacatccgttgcaatagcagcggcagcgacgtctgtcatgttttacggttctatccataaagcggctatggagaataaaacatatgccgaatcgtttaacagaatgatctcgacattacaaaaagcatttcaacctttggttgatgttttcgcggccgtcatgccgtatgtctacaatttcataaccaaaattggtgaattgatcatcaaatttaacgaagcacatccggttttatcgaaagtgatagccggatttactttgttattgcctgctttgacattgcttttatcgccgttgtctatcggtatcggtctgataaacggctggcgtgctgccttttcggccgtctggatgatcatagggccattggtaaccggtcttggggccatgatgggtactgtcatcctggtagcggccgcgatcgctggcgtcagtgctgcattatacctgctgtggactaaaaccgattggttcaaaaaagcggtcatcaccgcatggaacaacataaaaacggccacgcaaacggcatggaactggataatgaacaatgtcatttcccctgtcatgacagccattcaaacatttatccaagaaaaaatggctatgatccagcaattttggaatgaaaatggttcgcaaattatgcaggcggcacaaaatgtttggaatgtcatttccacggtcattcaaacggctatgtctgtaatcgggacaatcatgcagacgctttggcctgttataaaagaacttgtcatcggcacatggcaggcgatccagaacgtcataaacggcgcgattaatatcatcatggggattgttaagactttctcagcccttttcactggcgactggaaaggcgtttgggaaggggcaaaacagatcatcagcggcgcccttgaattaatttggggatgggttcagctattcgggatcggtcgcttgctcaagttctttggcggcttaggcgccaaactgctaagccctatcaaatcaatgtggaacagcatttccaacgtcttttctagcactctcggaaagatatggggctgggtaacgagcaagtttaaaggcatcgtttcatccatcacaagttccatgaattcggcccgaaatttgataaatcgcgtctggaacacaataaaaagcttcttttctagcatcttaagcggcatctggaacactgtgaaaagtaagtttcaaggcgtggtttcagctgttacaaattctatgaattcgactcggaacaaaatcaacagcgtttggaacgccataaaaggatttttcgcaaatatcctaggcggcatctggaatacggtaaaaagcaagtttcagggcattgtaaattcggttggtagcaagatgggcgcggctcaaaacaagatcaaaagcatctggaataaagtgatgtcctttttcaagggaatcaaccttttcagcattggccgagacattatcaatggtttgatcaagggtatcggatcaatggctaatgcggtatggaataaagcgaaaagcatcgctgacggggtgacaaacaagatcaagagcgctttacgtatcgcatcgccttcaaaggtcatgatccagtttggtaagtggacgggcgaaggtctcgaaatcggtatggataaaagcgtaaaaggcattttgaaggcttctgaaaagattgcgagtgctgctattcctgatcttccagatacacagacggtgacaagcaacatctttaaagccccatccatgcagacgccgcaatcagacatgtcaggcattatgatggctattcagaaccttgcgaacgccgttttaaatcagcctgtagaggtcgatatcccggttatccaaacgagcatgaatatcaatagcagacagttcgccacagcaacaaacaaagacatgacgaaagcgcagcgccgccaagatttcagggataaacggaggtacaaataatgtctctcacttttaatggaattacaaaacattttgttcatgcgacagtcgagacacaacggccgatatgggcaccagtcgaaagggaattaattgagattcccggccgtcctggtgcttttttcagaaatactaaggtcaagccccgtattattcccgttggaatcataattaaaggcgttgctgacttgcaaaaggcaaaagaagaagtcgcggaatggctaatcactgataagccggccccgttgattctgccggatgaaccagatcggacctattacgccatgatagacggggaggggcagctttctgagattttcaaatttggaaaaggtacagtcaatttcgtatgtcccgacccgtacaaatacggggcagaacaatctttctctattggcgaggctgccgatcctgtgggacatgttcaaagtaacggaacggccccgacataccctattatcgaatgcacattcacgcaagcggctgacaaatacgaggttcagcttttaaatgatgacttgagcgttaaagcgttcgttctactgaatttcgattttatagcaggcgataaattggttttagattttgccaatcgagcggcaaccctgaacggagaagacaaaaaaacggcatatcatatcacatctgatttttttaagataccaccaaaaaaagatacaccaattagcgcaacgcagccaagtacgctgaaattcacggacaaatatttgtaaaggcaggtgatcacatggcagatttatggattttggacaagaatgatagtttgctcacaatcttgtctagtgatgccgataatgcctgtgttttttgggacgcaatattcagagaagaactgaacaaatcatcgacatttcaatttacatgcgatgccacgcataaagatagcaaacatgtagcgaaattgaaccaggtcgttttcaaagacaatgacggttttttccgtctcttcaaaattcgtgagattgaccgtacgaacggcgaaaatcaggccgggaaaatagcgcaatgcgagcctgcagaactggaattgcttgaaaagatcattgatgatatacggccatacaacactactcaattagatgcgctggaacgcgccttagttggcactcgatggaaggctaacgttacagcaagcaacggcataaactcaacgaatttctatcatatcagcgtatatgatgctattacggacattatcaacacatggggcggagaattaaagtttactgtcacattcgataccaaaacaaataaaattgttgaacgcgtcgttaacatcgtgcagcggcggggagcggataacggcactcggttcgaggttggctataacatcgaggaaattcatgaaactgaaatggcttatccggtctcggccctgtggggctggggcggcagcgtcgaggatgaaaacggaaacgactcgcgctttattgactttgctgatgttgtctggagcaaagcgaacggcgacccggtagacaaaccaaaaggccaaaagtgggtagaatacccgccagcaaaagaaaaattcggcttacagacaccggatggcgttattaacgttgagggaaaatggcaagacgaaaacattaaagacccggttgaattacttcaaaaaacatatcatcatcttgtcaatgaagcatcccaaatacagaccaattattcttttgaggttgctctgactaacgagacagtagaactcggcgacacctgtcttgctcttgatcgaactatccctgatccgatcgaatttttcggccgtgtgattgccttagagtatgatgtgtcagaccagactttcccagcaacggtcgaaatgggccaattcttgagcgtatacgagcctgatacccgtctggatcagatcgaggataaaataagggaaatcgaacagggccgggatatcgtggttgacgatggcagtttcccggacaccaagccaccaacaccgaaaaacgttgttactaaaggtctatttgaaaaagttgctatcgactggtattacgagactttctcatacattgcggcttatgaggtatacggttctcaggttaaagacttcacgcctgataccgtgaatttttctaatcgattatggcgagggaaagcaggcggctggattcatgaagctgctgttgatcaagtttggtattatcgcattcgttctgttaacacacgaggcacgcccagcgatttcacggcgcaattttcggcggcaacaacaagaattggtacaaaccatatcgaagatcaatcaatcacaaatgccaaaattaaggatttatctgccgataaaatcacagccgggacaatcaacggtataactatccggggttcactcattcaaggggcgcgattcgaggcgtctaaccaaaatgaagatttccagtcatggcttgagaacggaaccttttaccaatatacgcgggatgacgcgacagacatatacaataaattaactattactgctgggatggtcgaacaagaaacgggtgaattttttatggaaggctgggattctaatgccgttcacactaaaattaacattgggaacggaaaaattgaagttcgaggcattccgggcgaaaacggatatgcatcgccccctttaatagatatgttttccgaaagggattttcaagataatcccaatatggaatttgaagataatgaagtttcgcggtttagattgggttatctattaggaacggactttaaagatatatattccacgacagcgggtgaacataacgcactggatcgtttagatgatgatcaatataacacgttcggccctgtcagcggcagtagtaacggcaccgtttatctttcccgagttgatggcccaaaatcgctgtttagatataagccttttggttttgatgttgtggcagagggcggtgtccgcctaaaagccgataagatgttattcgatgccgccagtcaattgatactgcctcctaaaacaaaaattaaaggcggcgacggcacatatacgccttatcctgctgtttttggaagcattaaaaaaaaacttactgacattcacggaggattacagcactgtttgggtgttttgcttgatgaacttacccttactatgccaatgaacggcggagcctatggatatacaagcttcgattatcctttggtcggcgatggatcttacaacaaaatcgagaactgttttgctgttttcgctcaggcttacggagcgtattcaaacgccgttacggtcgggattgaaaaacaatcgtcaagcggattcacaatatatataagaggaaccggcgcaacatccaatatagaagccaggtctatgactgtaaggttggcaattttctatgaagtagtttagagaggtgtaaaaaatgattcaaagaaaagacgttccggccgcatggtactttgaaggtatggaagtgacagagacggacacaggcatagagataagcgcctgcgttcttaaacatagagacgatatttacccgtttgaagaggtttcattcgatttgattcctgacgataaagtgaaggtcgcatatgatctatacgtcgttttggatcaagagacaaacaaaatggactacatgttagtccgtacctatatagaacccgacggctattatcctggttataacggggataagcggctcattcacacactgttaacaatagaggttgacactactggaaaccgaagcggcacaatacgcaattaccacgagtaggaggaaaacgatgaaacttgaacccattgaacagaatatcgaagcgaaaaagagagccggccagaaaaccaaagaagaaatgttgcgggaacaattagtttatactcagcgtcttgccaatgacttgataatgaagcttgagggaacacaatcgtgatggaggcggtcgatatgttcgaaggtaaaagtcgctactatggtcacttttattactgctggctaaacggaagtgtgacaacaaaagagctgtacatccatgtcgaaaacggaatgataaccgaagaagagcgcgtagaaattatgaagaatccacgcggcgacgctttcccggacgaagtataaggaggaaaaaacaatgaaagtcgaagaaatgacaagagagcaattgcaagcagatcgagaaattttcatttatcaaacgaaggcgtttaatgacgagttacaaaaggcgaactatgatttaactcgatataaagctatgtataccttgaaggctaaggaagttgaagatttaacactacagctaaaggaattacagcaacaacttaatcaaaaacaaccaaaagcggcgaaataagcggcttttttattttgctcaaaaaaggagagaaaaacatgagacaaaacactgataccctttacgcctcgtttgctggtggcagcactggcattttagcctatttgtttggaggtcttgatcatttgttaactgcgttcatcatcattatgactgttgattatttaacgggggttgctgccagccttggcaggataaaagcgtttcatccaaaacggcgtttagcggactcttgaaaaagggtgccatgctatccctaatcattgtagctaatcaagttgatatcattctcggcaatgacggacagttcgcgcgctacgctatgatcatgtttttaattggtatggagggtatttccttcattgaaaaccttggacgcttgggcgtcgcggttccaaaattccttgtcgatcgtttcgagcagatgaaagacgaagacgaaaaaaccccagaaataagaaaggatttgatcatttatggcaaaagtatggttagatgcaggacacggcggcaaagattccggagcggcggcaaacggcatgaaggaaaaggatttagtcctgaaaatggtcaaatatgcgaaatcttatttagagaaccattataaaggcgtacaggtgaagctgacgcgttcgactgatgtcttttatgaactgtcagagcgcgcagatatggcgaataaatggggcgcggatgtattcgtttccttccatattaatgctggcggcggcaccgggttcgaaacgttccgttatcccgggactgctggtaagactctcgacttacagaaggcgcttcataatgaaattcttgcaactatgaaagcatacggccagatcgcggacagaggtttaaaacaggctaaccttgcggtagtccgtgaaacccgtatgcctgcagtccttacagaaaacctgtttatcgaccgcaaagaggacgcggaacgcctcaaggattccggctttctaaaggcagtcggcgaagcccatgcgcgcggaattgcgaaatatctcggtctttccggaggctcaagcaagcaaccagcaacaacggctccaaaaaaggaagcgccgaaaaaggaaagcgcgaaaaagcctgcagtaaaaaagtacacgctgccgaccgggatttacaaatacaaaagcccgatgatgaaaggaacggccgtccggcagattcaggaggctttagctgccctctatttctatccagacaaagaggcgaagaataacggcatagatggctattacgggccgaagacggcgaacgcggtcaaacggttccagctgatgcacgggctgtctgccgacggcatttacgggccgaagacgcgggcgaagttgaatgacctcttaaattgatctttgaccactttttgaccttctttgtagtatcttttctgattgcctgaggttttatcaccggataaaccaagaaataaatctggttgagattatgacgaatttcgggtgatttaagggatatgaaagagcgtaaaaaatacggacttaaaggcgcacgccgtgcacctcagttctcaaaacgttaatttctggcgtttcaaaaactctcaagccatttggtttgggagtttttttattatattttccgccctatatatgaagcggatactggagcagagcccgattccctcgcccagacggagatttggccgatatggtggatctcgtgtgcgattaaatgccttaaaatatcgccttgcgtacagacttcgtctgaccaagccgctttaaccggcagatgttcgaaggcgctggaataattaaaaattacactttctatttctgagcggtgcaggtcggaaaaccgagcgatctgctgaatcgtctggtaatgagagtaatcaggttgaatatccggtttttctaaaatggcgtagatccagcttacttccacatctacaatatgaaacagatttttcttaatgcttcccattccgcctgaacgcttcttgaccagctcctcttgcggctggctgaggcaccacttaaaccatgcatgtcgaacttcccaattatattgaaacaatcctttcactcatctcacctcttctaatattttcggcttcttcctccgtttcccttccttagaagagcatgatttccggctcctgactgcacaatacaaggtaaaaaggaggcggtttctatggggacggtcgtatcttttaacaatgaaaaacaaaagaagcagatcaatttggaaaaacagcttctgcgcgaactgtctttggaaaaaatgctgaattctgcagaggaatgctttgctcctctttttcactttttttctaagcatacggatatcttatatgacggctgcatcgactttgccattgaggcatatttgctgggagccgagtacgggaagttcggctatcacggagaacccgttcatcgagcgatgatccgctcagaaaaagaagaaaaacagctactgcacgagctttatgaatatgctgtcagctggtctgaggcttttaatgttcaagctgcttatgaaccgctctattatgcctgcgaatacttcatccaaagctggtggaaggaaggcttcagccagcgggaaagacgctttaagcttcggctcagataaaacaaagttttatgaaaaagtgaggccaagcttaatcatatttcctttccttgtcccatatcttgtagtaaggacgagcgggagggaaagggatgaagaaaaaaataaaatggctcgggtttttactcggctttgtcgttttattatgtttatttcaatatcaattcaacaatgatgattcttggcggtcatggaatcttccgctgagcggcaaaatcatttatattgatcctggacacgggggcgccgatggaggggcatcaagcggtgaactccttgaaaaagacgtggctcttgaagtatccctaagaatcagggactatctccaggagcagggcgccttggtgatgctgacgcgggaggacgatcatgatctcgctcctgaagaaacgaggggactcagcagaagaaaagctgaagacttgcggaagagggtcgatatgatcaacaattctgaagccgatctttacctcagcatccatttgaatgcgattccttccgcgcgatggagcggtgcgcaaagcttctattacgggcaatatgaagagaatgaacgggccgccaagtttattcaggatgaattaagacataatcttgaaaacacgacgcggaaggcaaagcggatacacggaatttatttgatgcaaaatgttaaaaagcccggggcccttgtcgaaatcgggtttttgtctaacccggaagaggcaaaacagctggccaagcccaaatatcaggacaaaatcgcagcatccgtttataaaggcgtattgcgctactttacagaagacagagcccctcctgaataagagggtttctttttgtgtcaaagacactataaggaaagatatgctatacttattttgtaaacgaatacaacaaagggtgagatcaatgttgcgagaagacgatgtaaaaaagatagtcggcgatttggacgagccatttcttcacaagccgctcagagagctggatgccgtaaaagaaattaaaataaaacccgaaaaacggcacgtcagcgtaaaggtggcgctcgcaaaaacgggatctgccgaacaaatgcagcttcagcaggaaatcgtcatacggttgaaagaagccggtgcagagacggtcggcctgcgttttgaggagctgcccgaagaagtcgtaatgagttatcaagagtctgccaaagggcaggatcaatctctgctgaatagtgaaaaacagcctgtgtttttagctgtggcaagcggcaaaggcggcgtcggcaagtcgacggtgtcggtcaatttggctgtgtccctggcgcgaatcggaaagaaagtcggattaatcgacgccgatatttacggtttcagtgttccggatatgatgggaatcactgtacggccgacgatcgaaggagaaaaggtcgtgccggttgaaagattcggggtcaaagtgatttcgatgggattctttgttgaagacaatgcccctgtcatttggagaggccccatgcttggaaaaatgctgaataacttcttccatgaggttgaatggggggatgtcgattatattatcttagacctgccgccgggaacaggcgatgtagcgcttgatgttcactcaatgcttccaagctgcaaagaggtgatcgtgtcgacgccgcaccctactgccgcgtttgtcgctgcaagagcgggcgcgatggccttgaagaccgatcatgaaatcgtggggatcgttgaaaatatggcttattacgaaagcgtcaaaacaggagagaaagaatatgtattcggcaaaggcggaggcgaaaagctcgcagaggaactaggcgttccaattctgggcaaaattccgctgaagcagccggattgggatgacagcgaatttgcgccgtccgtttatgatgaaagccacccgaccggcgccatttatttggatatcgccaaaaaaatcgacgaaagcattggcgcaaaagcttaaagagcaaaaaaagcttcctccgcagaagaagcttttagggaatgaaaagcggctcagctttgtttttcttcgccgcctttcatttcttctttcatgctttcagcagcagcttttttcagttcctcttcaaactgctttctgtaaagagggcttgtcagagtgtcagatatgacttcctgcaggtggcttcggaattcctggcttctgacaagttcaccgtattttttggccatttcaggatcctgcatgacctgcatcagcattttttggtactcaggatctttcatcagttttttcagcactttttcatgttcattttgaagtgttttggcaaagccttcagcgaattttggatcttcaaagacttttttccaaaattcagctccttttttggaggtcattgttttttcaacggtttctttgacagttttttcatccattacaagtgtttcatttaatttgtcatcatttaatatttcttgaatcgctttttttccgtcatctgtctttaatatatcgacaaccatttttttggtttgatcatagtccatctcagctgcttggtccgtgggagcacaagctgttacagatagaaacagaaaacagcttatcgatagcattgcggtcttgaacatgcttaagctcctttcgaaaactcgtcttacctttaatatgaatgtcttttaaaaatttatacataacaaaatatcgctgttacagcggtttatttaggggttgggaagtctacaatgaaaagccgtaatctcgtccgatttttcttttccgtattgggtgtcggagctttgactacaagtattgtcggttttgccatagagtggggaagatataaggagctgtttctttccttcgaggtattggagattctgtctgttcttttctggtttatcggggttggcatgatctttagcgtgattgctcaaatgggatttgtgattttcttaacgattcaccgctttgcactggaaattttcagatctcattctttgtggaattcgattcagctgtttttgattatatttgtcgcgtttgacttggtttacttgcgctttctgttttttgaaaaagatggaggctccatcattccgtacatttggctgccgctctttattttggcggtaggcattgcggccgcttatgcaaagcaaaaacagtcctctaaaaaaacgttcgtttccgcattatttctaatgtttgtttttactgtgatggagtggttcccggcgttaagggtcaatgaagaggactggctctatttaatgctgcttcctttattagcctgcaacgcttttcagcttttaatgctgccaaaatttcaggcacgcgcttagaccggctgctactttacttctgaagattttgcatccgtatttgcgattaattcgctgactgttacgtttttgagccccttgcttctgagatggtgcacgatctctggcagggcttcttttgtttgtttggcggaatctgaagcgtgaaagagcacgatgtcaccggcgtttaccgttccatttacgttttggacgatcttttgaacccccgggttcgtccagtcatccgagttaatactataatgaacaacggtgtagccgtactgtttagcaacatcgagtacgtctttattaaactggccggtcggcggtcttaaaagcgtaaggtcgtcaagcccgagtttttgaaaggagtgtcgtgcttttgctaagtcttttttgatctcgcttttcttcatttgcgaatagtttttataagcatagcccatactcccgatctggtgaccatctttacggattctttctacgacatccgggtggcgctctgcccatgaagctgatagaaaaaaggtcgcgtctttaataccgtttgcttttaatgtgtctaaaatgggcattgccttttgatctccccagctgatattaaatgtaagggctacttcatttgtatctgaatctcctctatataccgcttttgctccgccttctgtagaaaacacaggaagagggagcaggttttgcacataaaaaaaacttgctgtcgcaaaagcggctatcataataatgattagctgcttaatccgtttgatatgccacacataaaaatggttcacagaaaaactcctccttgtccatgctgctttgttttcatcctatgcttgtttaaaatagaacataacaataattcatcttaagaaaaaaattaaaaagagggttgaccggaattaaataaacatgttatattgttattcgtcgctgataaacagctgacatgaaaaagctccaaaaaataattttgagaaaagttattgacaaatatgtgagcttgatgttatattattaaagccgctgaacgaagcggaaatgatctttgaaaactaaacaagacaaaacgtacctgttaattcatttttataaatcgcacatttgagtgtgcgtagtcattatcaaacttcatggagagtttgatcctggctcaggacgaacgctggcggcgtgcctaatacatgcaagtcgagcggaccgacgggagcttgctcccttgggtcagcggcggacgggtgagtaacacgtgggtaacctgcctgtaagactgggataactccgggaaaccggggctaataccggatgcttgattgaaccgcatggttcaatcataaaaggtggcttttagctaccacttacagatggacccgcggcgcattagctagttggtgaggtaacggctcaccaaggcgacgatgcgtagccgacctgagagggtgatcggccacactgggactgagacacggcccagactcctacgggaggcagcagtagggaatcttccgcaatggacgaaagtctgacggagcaacgccgcgtgagtgatgaaggttttcggatcgtaaaactctgttgttagggaagaacaagtaccgttcgaatagggcggcaccttgacggtacctaaccagaaagccacggctaactacgtgccagcagccgcggtaatacgtaggtggcaagcgttgtccggaattattggggcggtaaagcgcgcgcagcgcggttttcttaagtctgatgtgaaagcccccggctcaaccggggagggtcattggaaactggggaacttgagtgcagaagaggagagtggaattccacgtgtagcggtgaaatgcgtagagatgtggaggaacaccagtggcgaaggcgactctctggtctgtaactgacgctgaggcgcgaaagcgtggggagcgaacaggattagataccctggtagtccacgccgtaaacgatgagtgctaagtgttagagggtttccgccctttagtgctgcagcaaacgcattaagcactccgcctggggagtacggtcgcaagactgaaactcaaaggaattgacgggggcccgcacaagcggtggagcatgtggtttaattcgaagcaacgcgaagaaccttaccaggtcttgacatcctctgacaaccctagagatagggcttccccttcgggggcagagtgacaggtggtgcatggttgtcgtcagctcgtgtcgtgagatgttgggttaagtcccgcaacgagcgcaacccttgatcttagttgccagcattcagttgggcactctaaggtgactgccggtgacaaaccggaggaaggtggggatgacgtcaaatcatcatgccccttatgacctgggctacacacgtgctacaatgggcagaacaaagggcagcgaagccgcgaggctaagccaatcccacaaatctgttctcagttcggatcgcagtctgcaactcgactgcgtgaagctggaatcgctagtaatcgcggatcagcatgccgcggtgaatacgttcccgggccttgtacacaccgcccgtcacaccacgagagtttgtaacacccgaagtcggtgaggtaaccttttggagccagccgccgaaggtgggacagatgattggggtgaagtcgtaacaaggtagccgtatcggaaggtgcggctggatcacctcctttctaaggatattatacggaatataagaccttgcggtcttatagacaggtgcgtttggatcttgtttagttttgaaggatcattccttcaaagcgtgttctttgaaaactagataacgaaagtagacattcacattcaattgtaatgcaagatatcacgtagtgattctttttaacggttaagttagaaagggcgcacggtggatgccttggcactaggagccgatgaaggacgggacgaacaccgatatgcttcggggagctgtaagcaagctttgatccggagatttccgaatggggaaacccactgctcgtaatggagcagtatccatatctgaattcataggatatgagaaggcagacccggggaactgaaacatctaagtacccggaggaagagaaagcaaatgcgattccctgagtagcggcgagcgaaacgggaacagcccaaaccaagaggcttgcctcttggggttgtaggacactctgtacggagttacaaaagaacgaggtagatgaagaggtctggaaaggcccgccataggaggtaacagccctgtagtcaaaacttcgttctctcctgagtggatcctgagtacggcggaacacgtgaaattccgtcggaatccgggaggaccatctcccaaggctaaatactccctagtgaccgatagtgaaccagtaccgtgagggaaaggtgaaaagcaccccggaaggggagtgaaagagatcctgaaaccgtgtgcctacaagtagtcagagcccgttaacgggtgatggcgtgccttttgtagaatgaaccggcgagttacgatcccgtgcaaggttaagtttgaaaagacggagccgcagcgaaagcgagtctgaatagggcgcatgagtacgtggtcgtagacccgaaaccaggtgatctacccatgtccagggtgaagttcaggtaacactgaatggaggcccgaacccacgcacgttgaaaagtgcggggatgaggtgtgggtaggggtgaaatgccaatcgaacctggagatagctggttctctccgaaatagctttagggctagcctcaaggtaagagtcttggaggtagagcactgattggactaggggcccctaccgggttaccgaattcagtcaaactccgaatgccaaagacttatccttgggagtcagactgcgagtgataagatccgtagtcgaaagggaaacagcccagaccgccagctaaggtcccaaagtatacgttaagtggaaaaggatgtggagttgcttagacaaccagaatgttggcttagaagcagccaccatttaaagagtgcgtaatagctcactggtcgagtgactctgcgccgaaaatgtaccggggctaaacgtatcaccgaagctgcggactgttcttgcgaacagtggtaggagagcgttctaagggctgtgaagcgagaccggaaggactcgtggagcgcttagaagtgagaatgccggtatgagtagcgaaagaggggtgagaatcccctccaccgaatgcctaaggtttcctgaggaaggctcgtccgctcagggttagtcgggacctaagccgaggccgaaaggcgtaggcgatggacaacaggttgatattcctgtaccacctcctcaccatttgagcaatggggggacgcaggaggatagggtaagcgcggtattggatatccgcgtccaagcagttaggctgggaaataggcaaatccgtttcccgtaaggctgagctgtgatggcgagcgaaatatagtagcgaagttcctgattccacactgccaagaaaagcctctagcgaggtgagaggtgcccgtaccgcaaaccgacacaggtaggcgaggagagaatcctaaggtgatcgagagaactctcgttaaggaactcggcaaaatgaccccgtaacttcgggagaaggggtgctctgttagggtgcaagcccgagagagccgcagtgaataggcccaggcgactgtttagcaaaaacacaggtctctgcgaagccgtaaggcgaagtataggggctgacgcctgcccggtgctggaaggttaagaggagcgcttagcgtaagcgaaggtgcgaattgaagccccagtaaacggcggccgtaactataacggtcctaaggtagcgaaattccttgtcgggtaagttccgacccgcacgaaaggcgcaacgatctgggcactgtctcaacgagagactcggtgaaattatagtacctgtgaagatgcaggttacccgcgacaggacggaaagaccccgtggagctttactgcagcctgatattgaatgttggtacagcttgtacaggataggtaggagccttggaaaccggagcgccagcttcggtggaggcatcggtgggatactaccctggctgtattgaccttctaacccgctgcccttatcgggcagggagacagtgtcaggtgggcagtttgaactggggcggtcgcctcctaaaaggtaacggaggcgcccaaaggttccctcagaatggttggaaatcattcgcagagtgtaaaggcacaagggagcttgactgcgagacctacaagtcgagcagggacgaaagtcgggcttagtgatccggtggttccgcatggaagggccatcgctcaacggataaaagctaccccggggataacaggcttatctcccccaagagtccacatcgacggggaggtttggcacctcgatgtcggctcatcgcatcctggggctgtagtcggtcccaagggttgggctgttcgcccattaaagcggtacgcgagctgggttcagaacgtcgtgagacagttcggtccctatccgtcgcgggcgcaggaaatttgagaggagctgtccttagtacgagaggaccgggatggacgcaccgctggtgtaccagttgttctgccaagggcatcgctgggtagctatgtgcggacgggataagtgctgaaagcatctaagcatgaagcccccctcaagatgagatttcccattcctataaggaagtaagatccctgaaagatgatcaggttgataggtctgaggtggaagtgtggcgacacatggagctgacagatactaatcgatcgaggacttaacctaaatatttgtgaatcgtctgtccgttatctagttttgagagaatgctctcagaaagccaaaggcaaggaaactcggctaaaggccctcacatcctgtgaggaacgcccagtaccttcgtcctgaaggcatagtttggtggcgatagcgaagaggtcacacccgttcccatgccgaacacggaagttaagctcttcagcgccgatggtagttgggggcttccccctgtgagagtaggacgccgccaagctgttatatatctttaccctgcatgaattgaagcttttcttattccgcagtagctcagtggtagagctatcggctgttaaccgatcggtcgcaggttcgaatcctgcctgcggagccaatgcttccatagctcagcaggtagagcacttccatggtaaggaagaggttttatcgttcgcagaaaagcttggaaggtcaatacttcaagagctttttggtgaagtggtcaagtcatgaccctcacaggtttaaagctcacgactttacaatcgtacataatatataagctaaagccatttttctttcgaggtaaaactcaaaaggaaggtggctttttttgttatgcttatcagatttgctatgaaagaatttttatcagagaaagaatatgaaaacttatcaaagaaaaccatttcagcttatcaaatgctttttgatgacttcttgaggtggtgtgaggagcaaggcttctccagagttcaagatttgaacacaagagcaattaagaactacctcaccctttgcaaaactgaaaagggaaacaaccctacaagtttaaacaccaaaagaagacaattcagagcttggtttaatttccttgttcaagaggagattatcgagagcaaccccacagaccctattaagagggcaaaagaggatattcacataaagactttcactgatgatgaagtcaaggagattctttcccacctcagaagaacaaaaagacgagaggacactctttttgctgttcgtaactatactatttttctcacacttattggaactggcttaagggcttctgaacttactaatttgaaatggaatgatgtggatttaatcaatcgttcgttcaaagtctttggtaaagccagaaaagagcaacttgttccactttcagaaacacttgttaaggagctaagcttctggaaggagtattgcttgaatcagttcaaagagctttccccttgggtatttgttaatcagaaaaacaatcaattcactgttaatggcttgaagtgctggttcaagaggttagctcaattgatggactttccagagacacgctgttcagctcactcttgtagacattactttgcaaagaagtggattcaatcaggaggggatatttcaacgctctccaaagtgctgagacacacgagcataaagactacagagaaataccttcaattctggggtaatgaggttgctgatgattatgacaaatacaatcctttaagggagatgagcttatgagctgggaaaagatttgtgatgagctaatggagtatggtttaagccttggatttacagaggaagaaataagagagatttttgaagaaaacaaagagcttttagattggattcagaaaaagtaaacaaaagacaaaacgaaaggagtctccctctcaaagtttggcgacctagaagggaaactcctcacacactggaggactcttggagaagtcctctcttttgctattttaccaaagagctggactccagagcaacctccataacttggagggtttatttgttatgcaatctttaagggattatgagacatttgagaccgtctcagaaatggatgaatacataagtaaggttttggctcactttgaacttaaaaagaccgagagggagcttctctggctccttgctggtcattctgttaaattcattggagtgagcttcttaaagctggactcaatggcttcagctcttggggtatctaagagaacagttcagagggctttgaaggttttgggtgaactgggtatcattaaccgagtaagaacactaagaccagttagagggggctttggagcttccattactcagatttgtccagtcgaattgtccactcgctcagagagtgaaactccagaggagacaaaggaagaagagccttttcagaaaaaagaaacattttctttcaaagcatttaaaaaagatttaaaaacattacgtcagccaaagaagaaaattgaggtagattacacattccttgaagcatttggagtgccagctcatttcattgatattgttaagccttttgtaagccctgaagaagcttactctatttggggtaaagctcaagtgcttgctaaaaggtatgctcctgatgttacagagattattgagccagttgtcagagcgtttaaagcttcagtgacagcttacaagtttaaccgtatcaaaaagagctttggtagctatttatggggagctattcagggggctttaagtgtagagcagagaagagtaaacgctggaagaggactattgagctggaactggttagaggaagcataaaaaaagaccctttgaactgggtcacttcatttcttgttatccaaggcttcagagagcttttcataaaaagaaggagcatctctgtctatctggagaagtagtttgtgaattttctccctgagttgctcagcgttagtagcaaggtagccatccattttagctccagttatttcataaattctgttgtttttaaggtcattgagcttgttttcaatatcaagtatttcatggctgtatctgtcgaaaatacttgttttgttttcactcatgaaggttcctcctcagtattttgttttgttatgctttattcttgcattgtagccagaccgtaaaagtctatgaagctcatcattacctttcccactaataacagaagttacatactcctttgttagtggttcatcttggtgagtgagacctttttcgtttgcgttctggactacttttacaatgctgttggtgtaagcatattctttgattatccatttttctaaggtgtcctctgggtatgtatcaactaggtttatgtagtgttgtagccttttgatttctctttcagctcgttctactgtaataagttttggcacaaataagcacctccagaaaaatagttctatttacatatttctacaaaataattgattttcctttaaattgtttaaagagtgtttgtttagttggtgagttatgttggttcagctccagaacatgaaagaaaaataatgatatggaatagaggttgtcaaaatagattgaaataggtgagctgagctggatagtagcttcataaagctggagcttattagttgtaactctttggtggtgggttgtgagattgtaagctttcagagttttacttccagaggtggttctccataggagaccttgagtttaactccagaggagactaaatgaggtggtctaaggagcttacccccatgtcctcacgagtacacctctaattccctgattcagagttatttcccagaggagtaaaccccagagaatctctctcaagccctcactcaagcactggctaccaaagagaccagctccagagtaaaccctcacagaaacgctcagaagggctcccaagaggaattgaaaagggaacacctcaaggcttccacccccaagagagtaactcagaagcaatctcccagactatactgaggagaccactttactagcaaaaacagcccttttagaccactttacaacccacctcagaagttctttcccagtatagagccattcttatgaccactttctacatagagaagtagtctggactctgataagtcacctcaaggggtgtttttgatatacttatattcgttaatagtcattgactgagaaggaaataaattggagtggactaaaatgttatgtgaatgtggtggaatgttatttgtgattgctatagaggaaccaccagagagcttatctaaacaagaaaagctactctataatcgagtttgtgatgttgaatgtgcaaagtgtggtaaggtttattattctcagccttatgattttggaagcaaagtgaatgaaattaaaaagacaaagccaatagaataaattgtttatgccagctccaaggatatactttaagtatttgccagttcagtgtgagaccttataggagagccagtgagggagtcttgaggaagtttactcttcagagttcagatacgtacttgagaagcttctagggcttgtttggagtgctggctcaagggttgtgctatggaagaatactctggaggaaattcaaagacaaaaaaaatcaggggaggggggcttttacacacacatagtaacatttttacaagaaatatttttaaaaacagccttggaagtaatctccagaagcaaacccctcagagaccagctcaagagaatacaattcacaccaataccaccaaagagcccacttcagaaagacaaataactgagcaaaacaagggaggggagtctcttaaaatccaccttaaaatttattttaaaaatttttttcaaatgcttatttatcaagggtttgaggagttttcctctggagttggttctggagtgtattaacaaaaacatagacacctcgctggtatatttagtgaattgtactttgagaaatgactactgaagagctgagttaaagtgttccagctcaagttctgatacaaataaattacctagatattccttctcataaaatcaaataaaaatgaaaagaagttacaactcatattaaagaaatagtaataaaaaaataaattgtagcaacagagctacacctcataagtaaaataaatagtaaataatgagatagtaactaatgagtttaccttataaatgaggtagactcttttttttgtgtgtttatgatttagcaaaagagaaggctctcctcaagtgctcctctattcgacacctcatttttatttataattatgatttcaccaataagcccactagaaaataccagagaaaaattatgagctggcaacaaaggagcttacgctccaaagctaaccccaagacccctatgagccagagttttatttacactaagaataaagagtatttcccctaaaaaacgaggaaaaaagtgagtttagccctagagccacaagggtttcagcgttttttctttctgtgtaatatttgatactggaattgctcaaagtgtgcaatatttgatactcgactaatttacttggaattaaaatacgaggtgggggttctccaaattacccacttggcgttccattcaaaaaacaattttcaaaacagccttttggagtaaaactccatcagaagccctcagagcccttctcagtgtttttatctccttcagagcttattacattagttcgctttgaaaaagccctcagtgagcaagtctggaagccataacgcaacttataacagttgcactttttatttctgctcccaaggatagttccttttaattgtaaacaacgtatgaaaagaatagagtgatgagctttttaaggtaaaacccatgagaacagataacaaaattatttttaaaaaaaacaaaaaaattttcagcccttgagccccaagggttttgagcttcaaagctctctcttgaggtgctaaaaaacagaagtgtcttaacaaaaaagtagacaccttgctggtatataaggtgagagggcaaaaaggaactacaaagagcttacttaattatcctagctcagctaggctccttttacagcttaccaagcttcaatctaagttacagttaattgcatttcattttattacctcagaggagctaaccactcctcaaacatcagctcccttgcggagcattaaaacactccaagagagttgaacttgccaagacctcctgaaagggagcgagcgagtctctctcccacttattatttaaaacatctttctttccctttctagcaagctgacgagcttgtttttatttttgggaaagagttaacaaattagtgaacggtacggagggaaagaaaatgaaaattgtaaaggagacaaagaaaacaagacaattagaaatttacagtgaaactggtgaactggttcaaagagtttgcagaacatgccagctcgtgaagttgccagaggattttccaaagtacactcaaggttatttgagaccagattgccatgagtgccacaaaaagaaacaaagaaaatatattagcgagacagcagaccaaagaacggtttacaagcaacgtgaaagagccagaaaagttggtgctcctgataattacactctggaagatttcttggagttaaaagcttttgctaatggtcgctgcatgataagcggaaaagagacagatttgcaaattgaccacattcaagcactctcaaaggggtggcttggaagtacaaaaggaaacattattctagtttctgaagaggtcaaccaagcaaaaagagatttgagtatatttgagtttttaaagagtaaccgctcaaaagggttggttgataaggaacagctaatgaaaacttttagatacctagctgaagccaataacatgacaatggctcagtacattgagtttttagaaggcatggaggaattggctgaacgagcaaaaaccttcagggggtgaaaatagtgtcagttcaattttatgtagatattgaaaagattttagagcgtaaaaatatgactctcggagagttggcaaaaaagacagggattcaaaaagcgagtctttcaagaatgaagaagaccaaaaaagtgacgttctcaacacttaatagaattgctaatagtcttggagagactgactgggagggtctggtaagtgcggagtttaagtcaagtgggaaaataattcgataaaagggagagggtaaattatgaaacttattgatattttaactaagaatgtgaaaaatgctgagagcactgagaaggtagttcagaaagcacaaaatgaaatgaacgcaattcaggctgagatttctgagaagaacaaacaaaagcaacaactccagcaagccatgaacgtgattttcgctagtttggtaattgacccagacgacaaaaacgctcttactcagaagaaaaaagctgataacaaaatttctgagctggacaaagagctggagaagcttactgagaaggcaaaaaaagctcaagaagctttaacacaagctcaaaaggataataacacttcaaaaggtgaagtgtttaaacaagaatacattcaaggtgttacattaggttcttttaaacttaaactcgaacaccttccagagagaatgaaccgcaaatttccaagttactcttataaaaattgggttgattggtcaaaggcttatggtttgccagttcagtctgttgtaactccagctggagtgagacttgaggagagaagagaaaatgttcctttcctcaaagaacaacaaagagaagctgaagctattggcatacgaaaagcagaagagcttattgcaaaagtagaaaaagctattgaagagattcttgctgaagaaggaattgagttgaacaagtaacaagccgaggaggggtctttcccctcttctttaagttgttttgaaaactatggaggtggttttaatgctacgcaaaggagctgatattgaattattaaaactaaaaatggagtttattaactctaagagaaatagagagcttgactggttcttgagattacaagagagaaagctagaagaagtaagtgagacattgagacaagtgggggagagaaacaatggattacgctaaaacgactattgaggaaggaattagagctggtggtcaattcaagacacctcaaagagtgaaacaagatgaagcatacaagaagaaattgaaacagatggagaattacaaccaagagcatttcacagctttccatgataaggagtgtttactggtgttcaatacattaacgcttgaactggctggagtccttcttaatatgtttgcttatatggaacaaggtgagtcaggacaactcaagcttgaaggaaaacgcatgggagtaaaagagctttctaagattctcaggaagtctgaaagaacagttaaaggatacctgaatgagcttgaagctcttggatacattgaagctgataaagatggaaagagaaaagtttactcagtagatactcgactagcaaaccgagggagaagggttgttaaagggtattttacaaagctttatattgtgagactcagagacgctctcaaggtgatgacaattcaagaagctggtttgctgttctttatgattcctcatatgaacacaagagcttttgtcctttgttcaaacccatatgagacagatattgaaaaaattgagctctggactagagaacaacttgctgaaggtgctgggttgtcactggttcaagtaaagagactggtttctagcttaatgaaaaagcaagtacttctttcagtgacaactcatagaacagctattgttctcagccctgaactaataagccgacaaactacaaagatttcaacttatgagattgcacagattcttagaaatgaagttaatggctctgaagtgagctggtaattaattaaaaaaccgaggtgagcactttggaaaacattaaaaataattacaaagctcttgtaatggagtatgaagaagcttctcagttctacttgcgaactgggctaacaaggcttctggctcacgctctacaaaacttggagcaatttgagagggcttttgttgagtgctactcattagaagaacttggagagctacaaattgagctaaatgctcaaggcttagcgatagtttaaataaaacgaggtgaaaagaaatggcaaaagaaaataaagcaaacctagaggatttagtgaaaaaggtgagaaaaggtgagtctctctcaaaagaagaaatagagcttttacactcaattctaagaaaggctaaagaggaaaaggaagccaagaaggatgaaaaagaaagtctttctgaggtaattgaaagaactatgaaaattgctcttgcagaacaaacattggagcaagcaaaaaagaactacttcaaaaatttaccccttagtgaaaaaacaaagattcttcaagggaaagtagacaaattagaaactttctatgagaagaaaacaccaaaacttaaagctgaagcaaaacgactcaagaaggaacgtgaagagcgtgagttctatgagaattactttaagaaatatggttacgagctgtaatgaaacgagagccaccccttgaggtggttcttttagatttactttggaggtgaaggaaattggctaaacgaggtagaccaaagaaagcaagtctcccagaggagctaaaaagaaaaattgaagctctggagaatgagactgatgaagtaaaaattaaagaaatgaaaaagctcatgaaaaaggagccagacatttgtggagcacttcaggggaatggaactgtttgtgttaaggctccttacattcgcaaagatggttccacttcagggagatgtattactcatggaggtggcgacacaagagcaaaaacaccagaagggagggcgagacaattggcaaatttacaccctaaagcaaggctaattcatggaatgtattctaaaaacattgaatttacgaaagaggaaactgagttttataacgagacaattgaatactttgttgagaattacccagaagacgttgacccaattaacatgagtttactacacagatttgcaattaaccatattaaagcaacaagattagagagcatgaacttcttgaaagaaagtcgctctaataatagctttgagaagttaatgcaaagctttgctcaagaccttggactcaataagagatacaaggacagtaaagaacacaagaacaacccaagtaatggagatattgctctattgtttatggatgataacgagaactaaacaaaacaactctctaggctcccttttagggggctttttgggttgctttcaaatatctcaccgagatggtgagtgctaaaaaaatgaaatttcaggaggatgatttaaaatggcaaaaaactttgtagaacaccatattcaagaaggtgctttccacacttttaaggtggaagctggtcaggtagttaaaattggtcaagtagttgaggttacacctaacggaggggttcaagtcgctggagctggttcaactaaagtccttggtgtagtttattccggaactgttggagttgatggaaagaatgtaggctattctggagataacaatgaagttgctactgttgtagctcttaagccacttgtttacttagaagcgaatgaaacaattaacgctggtgatatggttgaagctggtactaatggaactattgtggttcacaatgagggtgcaacttacttagccaatgaaggacaccaaaaaattgggttggctcttcaaaatggaaatgctggagaacgaattttaattgctcttggataataaaacaaacgagctagacctcttggagagaagaagtgctgaaggagcaaccctctggagcttgtactctctaggaggtttatctcttctaatcacttgggtcaaccagctcaagaactattctaaaggaggttggtgataatgttcgattactacgaatttgatagtaagttaatagttagattgaaaaggagctatgatattgactctctaggagtaaaaacagctattgaggagcttctcaaggaaaccaatgctgttcaagctgttgtgtctaaccatgaaaggacaattcacaaaacctttgagaatgaggataagattgactttgaaagtatgatgatttctgctccaccacttggaggacattctaggaagagtagagcaattaattctcaagaaattggaaataaataaaagagagaaaattgtttttttttaagtaagccaacttaacattgtggtcacagaattcttttactggggagtgtaatataaactgtgtaagtaaaagagcgtacggcttttactgcacagtttatttattttctgtagaataaagatataagataggaggttttgtacgtgactaataagaagcgtgacccagagtccgttaagctagcgaacctcatcttagaaaagtaccaaccagagacagtagaagatatgcaaaatgcattaaaagatatttttgggcccatgtttgaatcaatgttaaaaggtgaaatgaaccatcatttaggatatgaatcgaataataaagaagagaaaaagactaccaatcgtcgcaatgggtacgggaagaaagccattaaaacaagctctggtgaagtgaatatacaagtccctcgtgacagagatgggacatttgaaccgcagctagttccaaaaagaaaaaaagacgtgtcagctattgaagataaagtcttgtctatgtatgcacggggtatgtcccaacgagatatttcttccaccattgaagacatttatggtttctcggtgtcacatgaaatgatatcggacatgacggatcaagtacttgtcgatctagaagaatggcagtccagacctttaagcccctgttatgcttttttattcgtagactgcatgtttacaactattcgaaaccaatatgaaacgaagaaatatgcggtatacaccattttaggctatacgatggaagggaaaaaggacatccttggtttatggttgaatgaaacagaaagtaagcataaatggatgcaaatctttgatgagatcaaatcccgaggtgtagaggatgtatttttcttatctatggatggagtcagtgggctagaagaaggtgctcgtgcgatttttcctgatattattgtacagcgatgtgtggtccatttgattcgcaactctataaaatatgttccaagcaaagaatataagccatttacagctgctctcaagaaagtatatggtgccccaagccttaaggcttgccatagtgcctttgaggcatttcaaacacagtggtctacttatccaggagctgtagatgtgtgggtccgaaacttcaaccatgtggaacaactttttgactatggaagtaccatacgcaaagtcatgtataccacaaatgccgtagagagtatccactccagctttcgtaaggtgacgaaaaaaggagcatttccaaatgaaaatgccctgtttaaactcctctatttacgcatccaagaattagaaaataaatgggagggcgggtttgttaaaaactggtcaatggttatgaaccagcttttagtccacgaacacctcaaagatcgagtcctaaaatacctggagtaaattaggacttacacactttatttgacaatccccttttactgaccactcctttttctttttggctcatgcttaacaacttctataaatgtaacgatacgatttattgtttcattaaagtcttcctttatttcatgttcccatattcttttaatgttccaatccttttcctcgtaatatttattaacttccttatctctttttttatttctttcgagttttttctcccaatattccgtattactttttggtatattcccgtgtttttcacacgcatgccagaaacaagaatcaatgaatatgactattttatatttctgtattactatatctggactaccgtataatttcttaacattttttcggaatcttattccacggtgccatagttctttagtaaccttatcttctaattttgaacgagatttgattgcctgcatgttttttcttctttgttcttttgaaaccgtgtcagtcatagaagagtcctccaaagccacaataattgtattctataaacgaggaagcaagccctcaagcttaccccctcttagttccttttttgcctacttatttatttgttttcattttcaaattcatcataagaacccatttcacaaaaatcaatggagtaatgttgttcgctgtgtttataaacaattactgagtcaatatttagtctttccagcatttcataggttagaagttctttttcctctaagttcataacttgtcttagtagccattctccaagagcactatttggattagacataagtgctttactattgtcttggcataccttggctgataaaagcgatttgtctggcaagcgtaactgaaaaggtttatcacgagctgggaaaaatgttgggaatacattatgaatccattttggaattggtatataaatctcgttagggtttcgtggtcgacctaaagcattccattggtttagaccgcttttttctggtacatgacgctttgagccacggtctgaaaagagtggaagaataacgtgctcaaggttttcaaaaggattgacagttggtgctggaatttttggaatttcaaagccaaatagtttagccaattcatgataaggattttctaagatttcaacattaatttcttcaataggtttatcagtgataaaacgcttataaagggtgctcttagtgacattaaagctgtattcgtgtagaccgtcttcaaaggtgattgtatttctgttgttacttactttcacatttgtaattgaggagatttcaaccaagtccattggctcttcaaaaataagaattttccctggctttcttgttacacagtggtatatcattgaatcaataccatatgttcttttagtaaattcaattctctcgttacggagagaagcaaccgtgtttattagctcttttggagatttcccacgatacaagtctgagtctttattgaattcagctactttttgaagagtatgaccattaccatgaagaaaagtcttaataccaattccgacacgatttaatgaagcgtcagcagaacagtctgacctccccaagttttcagctccaaatgcttcacaaaaagcattttccacattccttgagaccaaataaggcgagtcactttcagagaacaaattggatagcgaaccagttgagcggagcatttgtttgtatgtagtgcagttgatggctggttgattagtatagaacattatttttcctcctcttttatgcttgtcatttcttctttcagacccaaaaggtagtcagctgatacgttcaatgtttcagctattcttttgaaagtgtccaatgatggagttctattttcactttcatatagtgaccaagtgcttctagtgaccccgactttttcagcgatttggctgggtaataacctacgagcttctcttgcattttgaatacgatttccaaggaaaggtatcatttttgcacctccaagatttgttgttttcagagtatcaccagaacccccgaaaatagtccaaagttagctaacagcaaacaaataaaaataaataagttgtttactcttagcaaacttgttactaaaatttgataaagttattcatttaatccagctcttatgctaaaattgcattagcggacaagcttaatgtttgcaaggaggtataattttgacttatcgagtaggtagtatgtttgctgggataggtggaacttgtttagggtttatccaagctggcgctaggattgtctgggcaaatgaaatagacaaaaatgcttgtattacttatagaaattattttggggatgcttacttacaagagggtgacattaacctaatagataaaaactccatacctgaactggacattttgattggaggttttccttgccaagccttctctatagctggctatcgtaaagggtttgaagatgaaaggggaaacgtgttctttcaaatattagaggtattggaagcacaaagaaatgtttatggacacttaccccaagcaataatgcttgagaatgtaaagaacttatttacacatgatagaggtaatacgtacagagtaataaaagaggctttggaagcctttggttataccgtaaaagctgaggttcttaattcaatggaatacggtaacgtgccacaaaacagagagcggatttatattgtaggttttcaagatgagagccaagctgaaaggtttagctttccagacccaattcctttaacaaatcaacttaatgatgtaattgaccgaactcggagagttgataaaagatattattatgatgaaacctctcaatattatgatatgttgcgagaagccatggacagtacagatacaacttatcaaataagacgtatatatgttcgagaaaatagaagcaatgtttgtcctacactgacagcgaatatgggaactggagggcataatgttcctattgtattagactttgaaaataatataagaaaactaacaccagaagaatgcttactattgcaaggtttcccagctgactatcattttccagaaggcatggcaaacactcacaaatataaacaagctggtaactctgttacggtgccagttataagaagaattgccactaatattattagcgtattgaacattggaatgaatataaatcaagaacatgaatatgcaatagctgaataagaccaactaatgagttggttctttttttataacataattttatttccctcagggctggctttatgctggctcttttttttctctccaaaagccttgatatagcaagctttgtaattaatgcaacctaataacctaaaaaggttgcaaaaagttattgacttagtatggaaagtgtcttattattatattacaacctaataacgcaaaacagttgaattattgttttagcaaagccaatcaactggctctggggaaatggactagaaatactccagctcaacaaatctctaaatcaaaggaggtaaatagacaaggaacagtcattagaattgtttaacacctcaagattttacttacttggtacttttgaacattaccttttgtccttacttaaaacctttttgagctggcactcaaggctggctacattaaaataaatggaggaattaaaatgatggaaaatctaactattaatacaattggaaattactttgttgctggtattgatggaattgaattgattgttaaggttattccaactggttttgaagcaaagctttcaagaaatggtaaagaagttaaatctaatgaggttttctgcttcaaggaagagcttagagagaaagtacatgagaatattgtagaagagcttgtaaacgagctggaatttgctgataaggacttggatagaataactcaagaattagatgaccagctcaataacttccttgaggaagttgttttagaaggggagaaaactcacagatatgttaattaacaagtttttgaaggggcttgaagctcctttttttatatttaattatttatttttaaccttacaaaactaatgataatgctggtttacagcgaaataaaaagaaaaaaatgctggctcccatgatgaacatagagattaaaccaacatttttctcacttactttgcaatattaaattatttttatttgtttgcggattccacttctacatttgagtaaaaaggaacccacaaacacctcaatttttttaaaataggttatttcaatacatgataaattttcatcaataatttctttagtttcttgtataatttctttccaacatctgaatttaataaattaactaaaaaaattaagaaagctaaccattcattcaaaatatcactctccaaaaggaggtgattgtgggcttgataaaacaaatatatgcagtttttattacaatgttgctcaatatcagtaactaaggaggttaaaaatgagcaaaagtacaatgtcacttgtgaaagtctggaagagtggaaacagcttcaatgttcatattaatgagctgggcattatgcttgtagttaataaagacaagcaaccaaagagctatgaaaagattgaacactggctctccagagatgatgaaaactttataactccaacctttgaagagtagccctcaaggctccagaatggcttatataaccttttgacgctaaagaggtgcaaatttattggagaggcataaaaagagcttagaaaggctcccagagcgttcttgtgagtaactgggagatttaccttctcagcttttctttttggttattatctgataatataaccgtatcgcttaataactgaataacgaggagggggaacatgaaaaacacagttatcaggttcgctcttgaggaatacttaaaacagaaaaatgtgagccagaagaagctttgtgaggaaactggtcttagagaatcaaccctctcaagtatgaaaagaagtgacaaagtaaatattgttcatcttgctactattatggaatactttaatgaccctgaaataagtaactttctaaaagttgagtatgaggagtaaaatttactgagtttcttctataatatatgttgctcagaagctctctgttgcatttatcttttataaggtgtgttactggtcaattaattgcttcacagagagccttctcacgagggaaaaataaaccaataaatattttaaaaaaagtttttaaaaccacttgcaatatatctaagacccctttataataaatcttgttcgcttcgagagagaagtggtaaatagcttcaatattatgtgaatcttgcttccatagctcagttggtagagcacttccatggtaaggaagaggtcagcggttcgagcccgcttggaagcttaagtgaatacgttgatatgacaaggtttctcctgttgtggggaaagctttttttgttttgcgatattttgcttttagacttattgaatgtataaaagcaggctaaatgcctgcttttatttttatccccataaaacgttcagtgtgacttcaaagacaagaagagacaacatataacttgcgtactttaacgtatcaggttcatgctgttttgagtctttaaaagtccatataaataatgcagcaacgcctataaaatggtcacgattttgctaagcgttaataatgacatgacgaccttcgtttatattgaaaattcatttatcatctatcttctacatttataattaaaatcccttttagctgtaaaaactttctctgctgttcaaaatccatttaaaatagagaagatccgattattcacactgccaaaagacttaatgttgttttggatgtttgaaaatagaatgacgtatctgctccctgtcagactgaaactgtttaatatgttgtagccgggcatgacaccgtggcttgaatagcttcctggagacacataaaagcccatgccgtatgttgctttattcggcgtaaacattttcataaaactttcattggaaatgatttttctttcgtaaagtgctttatcaaacaaatacatgtcataagcggtcatataaatatcaccggccccgtaaagctgtgataaatccggcatgtcaggcgtataaagctttttttgcaggtttaatttatatcctgtcgatggatttgactctttagcaaatgttttataaaagcctgcatgtttcataccggcaggtttaaaaatatgctttttgatgtattggtcgactggttcaccgcttaccatggaaacaatgtatgccagaaccgagtaattggagtctctataatcccatttccctgttgggtattttacaccccgtttttcgatatctttaattaaatcttccggcgaaatatatccgcggccttctttgtgacccctaattccggatgtatgcgtcaagaaatgataaagggtgatctttgagccgtttggaaaattgggaagatacttagaaacagggtcatttacagatagcaatcctttttcctccagctgtaaaattgccgttgcaataatcgctttttgtgatgaccccacataaaagacggtatctggtgtattgggaaccatttcctcgcggtttgcatataaataccctttgcttgtcaccacttttccatcttctacgatcaatgctgtgccgctgaatccaatgcttttcaaatattgatccaattgagcattatcattttttgtgacgattttgctcttttttgtttcattttgtgttggctttttctttgcttcaggctgtgcctttttttcacttgcttgcaattggttttcctggtgatctcgcataccgcttggaagtgcaagataaattaatccaaaaacaaccaaaaaggaaaatatgataagccttctttttgttttctgcttttttcttttctttattcgcgttctgtatgttcttgccatgtcgggtactccttcttttatatgtgacgtatttactgacgcaataaccccttaaaaagtttcttcaaaatgctaatattttcatacatgaactcgaataatgccaaaatttacattttgtttacacttgatcaagaacaaatgttcgtataaaatagaatgtgaggtgagacgatgaataagctgttgtatcgttccatggaagacggcattccggtagaaatcatatacatgaaaaaaagcggtttttctaagcgggcgattcttgtgaaagaaataaaaaacggttatgtgaaagcattttgcttccaaaaacaacagatcagaatgtttaaaatagagtccattttgtccgtgttcccatataaaaaaagaaattcagcccattatgcttaaaagcttcaccatcatcctgccttctttctgtattcccttcctgttttgatattccatcttttgttataatgaatgtaaattcgatttaaagagagcgagcgttttacatctatgcttcagacaatcaataaaacacttggtaagattatgcctttgctgacgcctttaagcgttgtcagcggagtactgcttgcagattatttaaatgggctggcgagtcttgtgccgtggatttttgcgtttatgacgtttgccggcagcctgggagcaaattttcagtcgctgaaaacagcggtggctcatcccttgccgatgtttctcgctttatttgttttgcacatatttatgcctgttttggcatggagcacggggcatcttgtgtttagcggggattcattgacgattacagggcttacccttggtgttgtcattccgacgggtattacgagcatgatttgggctgcaatgtataaaggtaacatcggtttaaccctgtcaattattttagtggacacgattctttcgccttttattgttccattcagtctttccatcttggccggggcgcatgttgaaatggatgtcatcggcatgatgaaggggttagttggaatgattgtgattccttctttattgggaatgctcgtcaatcaattttcaacgccggagcggacagcgcgattaagcgcaaattgtgctccgttttcgaaagtcgggttagccgccgtagtggcgattaacagctcggtggtcgctccttaccttaaaaacgtcgatttaaagtttttaacgatagccgttacggtctttttggtggcatttacaggctacctgacagcttggctgataggacggctgatgaagcggccccaggaggaaatcgtggctttaatttttactggaggaatgcggaatattagcgcgggcgctgtgttggccactagcttttttccgcctcaagtggcggtgcccgttgtcgttggcatgctgttccaacagattctggccgcgctgtttgggcatttgcttgcaagaagcgagctgaaaaaagcgcatcatttggacaaaaagacgagtctgccctcatagttggcagactcagatcttgcgggagttaaatataatgaaaaccaatagagtaagtgtaatgatctggactttaatctccgcttttctgttttgttctatgatagtcgcagcttcactttctccgctcgctcattcaggccctcatgctaatgagtttggcactttggggatgtgggcggcaatcggaaccgttttgctcttttatatgctgcccctcgctgtttatatggccgggtttgatgcaatgaagtttgtaatggctgttctttgcggaattgggttaatcatcacgctgactatgagtccagtgtttgtgttgattggcgctattggcggaaatgcttctgcattactgggtgtcgcaggtctttgcgttctgttagcgattgtgaatgtgatttggctagtggttgcttttcgccggacgtcagcaagtgcctctttctgatattcaaagttgtgttcaaatttgccaacttcctttagcgatcaggtggacgtttcccccgacgtgaatttctgtgctgttttccgttatttgggcttcaagatgaagcagggaagggcggtttatttcaaatccttgttcagcccttatgctgaggtagtgttgattaaaatagccgtgatgcagtaaataccctgcgagacccccgattgcgcttcctgttgccggatcttcaggaacgctgaaacagtcgcaaaatactcgtgcattgatgtggttttgttcatgatatgtttcggtagtaaaaacgagcagacttgcttctgtttctttcatgaaagcttcaaaccgatccttgttgattttgcattttttaactgcatttaacgagtttaacggtacgataaccgctggaagccctgtagaaacctcctgtatcgggaaattcgaatccatatcagatgtgtcgattccaattacccccgccatcatttctttatcaaaggttcggttaaacacgggcggattttgcttcatccaaatgatttgatcagcacctttttcaaacgtcaccggtattgcgcctgctgttacatttaaaatgacattagaagatggttcagtttcgatttcattcttaatgataaacgctgtgcccagcgttggatgtcctgcaaacggaatttctttttccggggtgaagattcggacatcgtacccgccgtttccctgttttcccaatataaaagtagtctcggaaaaattgatttccctggctattttttgcatttcatcacttgataggttcttttctgctttaaaaacagcgagctggtttcctgtatattttgtttctgcaaacacatccacaagataaaaatccatctgaagtatctcccctctaataagacgcagtttcacatatcttacatgagatgggaatgattgaacagtctaatcaaaaataaagaagagcggctcccgctcttcctaataaagcaaatacttctttctgatattcataaaccgtttttgctctgcttcgtattttttggcgatttcatcaattgaagcgccttgctcaatcattgttttgacccatccgttcccgatcagacggttgaaattgcctgaagggaggaactcaaagtcgtccgggtagaggtcatggacggttttgatgatcgcaataccggtatttacaggcttaaaagcggacctgttggtcacgtaaagctccaccccgtggcacagtttattctgatgctttgaaaatgtcggattgaaggaggcggctctgaatctgacgccaggcagcttcagaccgtttaatttttcggcgagctccgtacttttcatgtaaggcgcaccaatcaattcaaatggctttgtcgtgccccttccctctgacatgttggttccttcaattaaacctgtgcccgggtagacgatgctcgtatccggcgtcggcatgttcggggaaggcaggacgaaaggaagaccggtgtcttcaaagaacatctgccgcttccagcctttcatttttatgacggttaggtcggctccgatgttaaattcatcattaaacagctttgccaattctcctgccgtcattccgtgacttagagggacgggatacattccgacaaatgaagaataatccggatctaggacaggcccttcaacttttaagccgttttgcgggtttgggcggtcaaggacgatgaatggaatatcattttcttttgccgcttccatcgcatatgccatagtgtaaatgtaagtgtaaaaccgtgttccgacatcttggatatcaaatagcaggacgtcaacgtttttcaacatctccggtgtcggctttctcgtatctccgtagaggctgtagacggggagaccggttttttcatcaatataagagtcaaccttgtcaccggcttgagcgtctcctcttacaccgtgctctggaccatagagagcggtcagctcaataccgggggcttggtgaagcaaatcgatgctgcttgttaatgtcgaattgacaccggttggatttgtaatgagaccgaccctttttccttttaatatgctttttttgttcatgagcacttcaatacccggtgagacctttgcttttttttctttgtccggaaaggcagctgctgcggttagtgtactgaagacaaacattccagcaagcagccagattgctttttttcccatcatgaccctcctttgtgaagcggcttgccgtttttaatattcaatccgtagccatacgggtaaagggtttccccggggcgcgtgactgaaggaatgtctacgggcaatgttcctttaggctttgcctttccgaaaatggcttccactccggccgggatattcggctgcctgaagcgtccatttgcatagcctttaaagccgtataccgcaatcacggcttcggcttcttcaaaatttgccgtgtcataagggtttctcaggctcattaagacgaatttttttccgttggcctgcgcgtatttcatggcggcgcgcggaaaagcggttgcccacttgcttgagtcttgaatgctgtcatcaatgacaccgtcgttcacaaccggatcgtttttgatgacgtatgatcctgtgatgacataatcggcttcgtcaattttcttttgaatctcttcctcaaacgttttttctgcaaagcggtattcgactaccttgatgtttttccttattttgctgatggtctttgcgattgctgctgtttgctcttcatatggagcgagaatgaggacggtgtccccttttttcggtttaaacggcagggtgcttttgtcgtttttaaggatagtgacgctatcccttgccattttcttttcgtatttcatgtgtttgctgctgccgaccgttttcaaggcgtatttgatttttttctgaagcggttcggagccggtgtgatctatgatgcctcggtctatttttaattgaaggattcgctccaccgactgatcgatttgttccatggggatatccccatttttaacggctgtcagaagagcttcgaatacacgcgccagatttttttcggtctcaagcgatgtgacttgcgcgggcatgagtgcgatgtcgactcctgctttaacagccatgacgacggcttcctcctgtccgaaattatcagaaatggctttcatatttaaagcgtctgttacaacaacgcccttaaagctgagatctttgcggagaaggtctgtcatgacttttttggaaagcgtagcaggcaccatgatgtcctcgccgtcttttttgcttttataggtagtatcgtcaaaggcggggaactggacatgcgctgtcatgatcatgtcaatacctgcatcgatcgccttttgaaatggcgcaagttcaacacttctcagccttttttcattatgcggaacaagcggcaatccgtaatgactgtcaaccgctgtatcgccgtgtccgggaaagtgctttgctgtggcgatcatttgctcgtcctgaaggcccttcatcatctggatgccgagctttgaagtcagctcaggcttggaactgaaagaacggacgccgatgacagggttgtcgggattgttgttgacatcaagtacaggactaaaattcacgttaatgcccagtgatgataattcttttccgatgatttttcctgatctgaaggcgtttttgctgcttctcgatgctccgactgccatattgccggccaggtttgttcctgattcgagtctcgtgacaatcccgccttcctgatcgatcgtgataaagagcggaatgtcagggctcgcttgttgcaggccgtccgttaaccgtacagtctgctctgtgcctgtgacgttttcagcaaaaagaatgacgcccccgagccggtatttttcaatgattccagcaacttcgtcattcatttctgttaatcctttggcgctcgattccccttttttcttccagtttctaaagtcaggcatcagcatttgcccgattttctcttcaagcgacatgctgctgaccatttgtttgatgttttgttccggacgctgttttgcttctgcttcgcgagcggccggctgcaaagcgagagacgataacagcaatgcaatcaacgcgcattgaagaaatcttttcatataaagggtcgcctcctattggtgatgtaacgcctcgtaaacagctgtaatgacgctgccgtactttccggttgcaaattcatcaccttcgaattgattcgggttttctttagggttgataacaggagagtgctttttattggttaacaacacaatgccgatttgatacacgggatcaatgatagtaaccgttcccgtccagccggtatggccgtatgctttgctgctggcgtgcttgccgaacatccactccatatcggtattgccgttgagccgccatcctagtccatatgtgggatttgtttttgacggctctgtaaattgtgaaatgacagaactgctgaatagatgctgtcttccgtaaccgccgccgttcagcatgacttgaaggagcactgctgcgtcgtcaacggtggaaaacaggccggcatgcccagaaacgccttccattgaatagaatgctttttcatcgtggacttccccctgaagtgtgtaagttctgatgtttgggaacgaaatggtgccgtctctggtgtttcccaatcgttccgtagctgcaaaatgcgaccgtttaaagcccttttggagcggattaaacaaagtatgccgcaatccgagaggccggtaaaaccggttttcaacaaaggtatctaaacgctcgtttgtgattttttcaatgatcagcccgaggagcatatagtcgatgtcactgtaaatttgctttgtgccgggttcatatgccaagggggttttcacaagatattcaagcgttttgctccgtgattgagagtagaggtgtccggctgatttcgggtcgtaataattccagcttgcagggaagcctgcgttatgatgaagcaaatcaatcacgcggagccggttttttccctttacatcgtcttccgggtgatctttgaaatcagggagatattgagaaatgtttttgttcaagtcaagctttccggtgctcactaaatgctgcaaggcaaaattgacggcatacatttttgtattggaggctaggtcgaacatcgtgtttgctttcattttttttggatgtttgagcgctatgaggccgttgtatttctgcttgtagccgtagacttcttttttgatgatttttccgtctttaatcaaaataagggcagcgccgggaaagcccgctttgacatcctgttcgatcagacggtccacagctttaagctttttcgaagaaaaaccggcttcttcaggcgttttcgctttcgttaaaacaggatatgtcagccgctgttttgtctcgttcccgatggcagtctgtgctgtggacggaagcggaaaaaagcatgtcagcagcaatagggacgcggccgccctgatcataaactttttcagcttgcttcactcctttctgttaaaaattgcatagtgggaaattttaaacaaacgtttaatcaaattcaactgccatatcgtccttgaaaccaaaggagtatgttaagacaaagccggcagcataggaaataaacaaaccgagaatatacaaaagaacttggtgggtatgaaccaaaaacgacaaagggagccctgatacgcctatcgatacggtcgcaattttgaaatacgcttgaaatgctccgcctactccggccccgaggcacgcggttaaaaacggacgtccgagcggaagggttacaccgaatatgagcggttcgccgatgccgagcaggcctgacggcagtccgccggcaatggctctttttagctttgcttttttcgttttgaaatagatcgcaaaagcggcgcctacttgtcctgcgccccccatggccaaaatcggcagcagcgggtcatcgccgattgaattgattaattccatatgaacgggtgtcagtccttgatgaagtccggttacgacgagcggaaggaaggtggcgcccagtacaaagccggcgataatgcccccaagatctaagatggcgagaagacctgacgtaatggcgtcggaaatcaagccgccgacaggcatgaagacaacgtaggtgacgattcctgtgataagaagggagactgtaggtgtgatgatgatgtcgagtgagtgaggtacaaggcgcctgacccgtttttcgagaaaagcgataaatgcagctgcgaataaaatgccgattaacccgccgcgtcccggcaaaagcgcttcaccgaaaagtgaaatttcaccaacggcggggttaatgattaaaataccggctaatccgccgagtgcgggggagccgccgaattctttcgccgtattgatccccaccaggatacccaaatacgtaaatagacctgagcctattaccgttaaaataatcgcggtttgtgaggtttccgcgagccagccagcctggataacggctttggtgattccggtaatcaagcctgaggcgaccaaagcggggatcagcggtataaaaatgcttgcgattcgccggagaaacagcttgaaaggcgtcgcgtttttcttggaaatctccgctttatgtttggctgcggattcttttaagtcaacgtgttctgcggatttaagcagcttcccgaactcgtctgatacgtgctgtacaacgcctgtgccgaggataatctgaagcgtttcctcctcaactacgccgatcacgccttcaagcgctttgatcgagtcgatgtcggttttttgactgttgacaggcgtgatgcgcaggcgcgtcatacagtgggtatgatctgcgacgttagacgggccgccgatgtgttgtaaaatcagtcttgccagcccggcatattttttctcatcgctcattatatatcccccttttttacaattcgctaaattcccatcatgcggatggccgcttttgtttgatcaatatactgaatgatgtcctcgtagcgctctgcggccatgcctaaaaacagtaagtcaatcatgtaaagctgagttaaacgagaggaggtggcggcgctgcgaaacggcgcttcatttgagcatgacgtatacagggcgatatcgcttaatgaagcgacagcagactgtcccaaccgcgtcagcccaatggttttaataccatgttttttggcgagcctgactgcattggcgatttcctgtgtttctcctgaatgggatatagcaaacagaacgtcattctcgccggcattggcgattaatgtcgcaacaagatgcatatcactaaaagcggtggcctttttattgatgcgcaaaaatttctgctgggcgtctcgtgcgacgattcctgaagccccgatcccgcaaaaatgaaccgtttctgcgttgatcaatatttgaatcgctttttgaagttcttcgtggtcaatgttttcaaaggtatcgcgaatcgcctgaatcgaattgctggttgttttttgaacgattgaatggagcggctcctgtggttcgatatcccggtatccctgatcagacggcttcattaaatcaccggcgactctcatttttaaatcttgaaagcctttcagccccaaagatttgcagagccgtatcgccgccgccccgcttgtctttgccgaagagctcacctcctgaatggtgccgtttacgatctcgtgggggtttttcaaaatgtattcggcaagctttcgttcagattgcggcaatttgtgaagcatattctgaatgatttccaatcctcctgcagccattgtttcttcctttcttatttaagatttttcataaatggatagggccttttcaatatcgccttctgatttctccagcagtttttctgcagcggctgcatcttcgtttgttttcagcatgatgatggcggttttgacttggttattggacatttccaatgcttgcgccgctgtttcttttggcatacctgtgaccgtttggatgatgcggatcgcccgctcctttaatttgtcattgcttacttttacatctaccatgaggttttcatagactttccccattttgatcatggccgccgttgagatcatgtttaaaatcattttatgagcggttgcggctttcattctcgtcgatccggcaatgacttcagggccgacgactacttctatgctgtgatctgccgcctggctgatcgccgagttttcattgcatgtcagcgatatggccttggcacctgttttcttggcatacttcagggcgcctaggacgtacggagttcggccgctggcggcgattccgattacggtatcattgtttgagaggttaacggcttctaaatcccgtctgccaaaagcctcatgatcttcagcgccttcgacggcattgtacaaagctttttctccccctgcaatgatgcctatgaccgactcgggagatatgctgaatgtcggcgggcattcagctgcatcaagtacgccgagcctcccgcttgtaccggcaccgatgtagatgatccgtccccctttctttaacgacccgacggcgtagtcaacggcggtcttaacatcgggcaagacttcttgtacagcttcggctaccgttttatcttcatcattcatgattttcaacatatcgatcgtttctgcctggtgaatgcgcttggatctttcattgcggcgttcggtcgttaaggaacctaaatggctgttttccatcgacaaatcctcctgatcataaaatgcatatatttctaaattttcagtatattatggctggaatataatttcaatgacaaaagataaatattaaaattttgtttcaattaggttctaaacatctgaacgccgaaataaaataaagcgcagatgaactgcgcttatgtcctggtactacagctcgtctatttgatgttcggaaatcacacggaagccttcttttttcagaagtgccgacgtaaggccgttgccggctatttttttgcttgagaaacttccatcgtatatatggctgctgccgcaagacgggctgttttccttcagcacgatcgtatcagccttgatttgccttgccatctccaatgtttgatatgccccttttatatatagggtctgttacgtcatttcccgattgtgtcttgatcaccgctttgccgtctaaaacgtcttctcccgtcccgcctataatttcggccggttcccttggtgtttgaaatccgccgagcagctcgggacaagccatcaccgcttttttttcttcaacgagcttattgattttttcgacatagctgtgcgaaccgttatagcggcattccactccggccagacatgaacttaccagtatcattattcggtcccctctcttgcacatcagatagccctattttaaacaaaatttccgcgcttttctcaatctctatgaataaaaaatttgaaaataaaaattttaatttacctctttacaaatggggaggaacctgtatataataacttttgtcagctttacgagagctgcttgaaacacggtgatggcccgttggtcaagtggttaagacaccgccctttcacggcggtaacacgggttcgaatcccgtacgggtcaccattcttttttggacggcacgctgggaaaaggaaggcatgctaaagggagcaacattctgttgcaacgcgcacttgtacttcaaaggcaaggaaggcatgctaaaagcgcaacgtcctgttgcaacgcatgtacttgtacgtcctgtacttcggaggattagctcagctgggagagcatctgccttacaagcagagggtcggcggttcgatcccgtcatcctccaccatttttcgaagcggttttagacacaaccgcgccggtaactgcataagataccgtatcatgccggtctagctcaattggtagagcaactgacttgtaatcagtaggttgggggttcaagtcctctggccggcactgtttttggaggggtagcgaagtggctaaacgcggcggactgtaaatccgctccctcagggttcggcggttcgaatccgtccccctccaccattattgggctatagccaagcggtaaggcaacggactttgactccgtcatgcgctggttcgaatccagctagcccagtttttggacatcctgctcggatgtcctttttattttgtcttttttgtataactattcaaaaaaatgtcttgttgagtcaattccgaatcggaaggtacaatgaaggtctgaaagggggatatcatatgttaaaacagcagatttcaatgatcggcgtgccgatggatcttggacagctgaggcggggagtcgatatgggaccgagcgcgattcgctgtgcaggtgttaatgaacggctggaatgtctttgtcaggatattgaagacctcggcgatatgacgatcgggcaaagagaggatgagaaagaaggcggggagccggcatctgaagagctaagaaatttgaaagcgattacaaaagcgagtgtaaaacttgctgagactgtcgataatatcgtagcttctggcgcttttccgctcgtgctgggcggtgaccacagcattgcgatcggaacgcttgccggccttgcgaagcattatcaaaacctgggtgtgatctggtatgacgcccatgccgatttaaatacaaaagaaacgtctccctcaggcaacattcacggcatgccgctcgccatcagcctgggaatcggccgcgaagggctgaccgccatctatggaaaagaagctaaaattaaagcggagaacatcgtcatcatcggtgcgaggtcacttgatgacggggaaaaagaattgattcgcgacaaagggatcaaagtatatacgatgcatgaaatcgaccgcctcggcatgacaagggtgatggaagaaacgatagactatttgcgaggcaggacggacggtgtccatctgtcactcgatttggacgcgcttgatccgaacgatgcaccgggtgtcggaactccggtagcaggaggcatcagctacagggaaagccatctggctatggaaatgcttgaggaatcgaagctgattacgtccgccgagtttgtcgaagtaaacccgatattggatgagaaaaacaggacggcggaagcggctgtagccttaatgggatcgctgtttggcgaaaagctgctttaggtgcagttgaagagcggcttcaggctgctcttttttatgatagaagtctcaacttcataatatttatgatgtataataattttaagctaatattaagcgcatgaaccctgtcaaagcatctacaccctgccaaaaatttgataaactatttttatgaatttaatgaaaccttataaaaaccaattcgtatacataaagaccggtgaaggcagaggttagataaatatggaaacaatgattaaaaaaagaatcaaacaggtgaaaaaaggcgatcgtaacgcatttgcagacatcgtggatatttacaaagacaaaatttatcagctttgctaccgtatgctcggcaatgcgcatgaggcggaagatattgcgcaggaagcgtttatcagagcatacgtgaatatcgacagttttgatatcaaccggaaattttccacatggctttatcgaatcgcaaccaatttgaccatcgatcgtatccgtaaaaaaaagccggactattacttggatgcagaggtggcagggactgaaggactgacaatgtattcccaggttgcggcggatgttgcgcttccagaggatgaagtggtttctttggagctgcacagcaccatccaggaaaaaatcttaaggcttcccgataaatacaggacggtcatcgtattaaagtacattgatgagctttcactcattgagatcagtgaaatcctcaatattcccgtaggtacggtgaaaacgaggatacacaggggcagagaggctctcagaaaacaattaagggatctttaagtggggtgatgaaatgagctgtccggagcatattgttcagcttatgcataaataccttgacggagacatacttccggaagatgaaacgcgtttaaaagagcacctccaatcatgcgaaggctgcaaaaagcaccttcatgaaatggaaaaatccatcgctcttgtccagagcacgtcgcatcttacagctccggcgaactttacagccaatgtgctggcgaatctgccgaaagaaaagcggacggcatcgatcaacaggtggcttaaagcccatccgtttttagtggcggcggctttatttgcaattttgatgggcggcagctttttctccagctggaaaaacgatcacgatttcagcgtatccagccagcctaatcttgtggtgaaaaacaacacggtcatcgtgcctgaaggcgaagttgtcaaaggcgatgtgaccgtgaaaaacggaaagctgattatagagggcaaagtcgacggcgatgtcacgattgtaaacggtgaaaaatatacggcttcagcaggacaagtcaccggtcagatccatgagatcaacgaggtgttcgactggatctggtataagatcaaatcgaccggaaaatcggtttttggtgtgaaggagtctaaagagtagagcaaagcgggcgaatgagctttgctctttttttatgaggggccgccatttcacttggaaaatcaatttgtgctataatagcccctgtatatataaaaataatagatcataccattttgaaacatattaaccttactaatgactgaattcttggaggacgaggaaatggcttttgaggatatccctttcttgcagtacctcggcgatgccgttgatattctccttgtttggtacgtaatatataaattaatgatggtcatccgcgggacaaaggcggttcagcttttaaagggaatcgtggtcattgttctcgtcaggctggccagtcaatatttaggattaagcaccctgcagtggctggttgaccaggcgatcacatgggggttcctggcgattattatcatcttccagcctgaattgaggagagcgctggaacagctggggcgggggcgctttttttcgaggagcggaacacctgaggaagagcagcagcagaaaacgattgatgcgattacaaaagcgattaaatatatggcgaaacgccggattggcgcgcttctgacaattgaacgggagacgggaatgggcgattacatagaaacggggatccctttgaatgcaaaggtcagctctgagctattgatcaacatctttattccgaacactccgcttcatgacggagccgtgattatgaaaaacgatgaggttgctgcagctgcctgctaccttccgctttctgaaagcccttttatttcaaaagagcttggaacgaggcacagagcagcagtgggaatcagtgaagtgaccgacagtctgacggttgttgtatccgaagagacgggtggcatcagcgtcgccaaaaacggagaccttcaccgtgatttatcggaagaggcattgaaaaatatgcttgaagcggaatttaagaaaaattcgcgggaaacttcctcaaatcgctggtattggagggcgaagaaaaatggataagttcttaaacaatccctgggctgtcaaagttgtcgcgttattgttcgcgtttcttctttactttgcggtccacagcgctcaggcgccgactccgaagaaaccaggtgaatcgtttttcccgacatcgacaacagacgaagcgacgctcaccgatataccggtcaaatcgttttatgatgatgaaaactacgtcgtaacaggcgtgccgcagacggtgaatgtcacgattaaaggcccgaccggaaccgtcaagaaggtcagacaagtgaaggattttgagatttatgccgacatgcaaaacctgaaaacaggcaggcataaagtcgagctgaaggccagaaatgttgccgacggcctcactctgaccatcaatccatcggtgacaaccgtgacgatcgaagaaaaaacgacgaaggaattcccggtcgaggttgatttttataataaaaacaaaatgaaagacggctacacgccggagctgccgatcatcaacccgaaaaacgtcagcgtcaccggctcaaaagccgtgatcgacagaatccagaacatcaaggcgacgatcaatttagagggcgtcgaccagacggttgaaaaagaagccaagcttacagtatacgacaaggacggaaatgtcctgccggttgaagtcagcccttccgtcgttaaaatcaccgttccggtgacgagcccgagcaaaaagattccggtcaaagttgaccggaaaggcagccttccggacggcatcagcatttccagcctcgatataagtccgggagaggtgaccgtctacgggccgcaaaatgttcttgattcgttagaatttgtcgaggccgacgagattgatttaagtaaaataaaggatgatactgaattggaagccggcattaaagtgccggacggcgctaaaaaggtgtcacccgaaaaagtgaaaatccaggtgaaagttgacaaggaagaagagaaaaaactgaaaaacgtttcaattaaaaccgcggggctgaatgacagccgggatcttgaatttctcgatccgaagtcaggcaagctggatatcacggcaaagggctcgacagccgcgatcgaaaaactccagccttccgacgtcgagctctatgtcaatgtggcggatcttgatgacggcgagcacaatataaagctggaagtaaacggtccgcagaacattacatggtcgctgccgcggcaaagcattcgagtgaaaatctcatctcaaacaacccaaaacgaaaaaaacaatggtcaggatgaagaagaagagaatcattctgaaaaggattcacaaccttcatgaatcaaaaaggagcgatattaatgggcaagtattttggtacagacggtgtaagaggcgtggcaaacagtgaacttacacctgagctggcctttaaagtcggacgctttggcggatatgtcctaacaaaagataaggagcgtcccaaggttctgatcggccgtgacacgcgcatttcagggcatatgctggaaggggcccttgtagcaggccttctttcgataggagcagaagtcatgcgtctcggcgtgatttcgacgcccggagtcgcatatttgacgaaggctatggacgcggaggcgggtgtgatgatttccgcttcccacaaccctgtccaggacaacggaattaagtttttcggcggcgacggctttaagctttccgatgaacaggagcttgaaatcgagcgtctgatggatcagccggaagatcacctgccaaggcctgtaggcgctgatctgggcatggtgaacgactactttgaaggcggacagaaatatttgcagtttcttaagcagtctgctgatgaagacttcacaggcattcatgtcgcgcttgactgtgcgcacggggcgacatcttcgctggcgacccacctgtttgccgatcttgacgcagatgtatcgacgatggggacttctccgaacggattaaacatcaatgacggagtcggatcaacccaccctgaagccctggcagaatttgtgaaggaaaagggagctgacgtcggcatggcgtttgacggggatggcgaccgcttaatcgctgtcgacgaaaaagggaatatcgtagacggcgatcaaatcatgtacatatgcgcgaagtacttgaagagcgaggggcgcctgacggacaataccgttgtctccacggtgatgagcaacctcggtttctacaaagcgcttgaagcggaaggcattaaaagcgttcagacagcggtcggcgaccgctatgtagtggaggcgatgaaaaagggcggatttaccctcggcggagaacagtcgggacacctgattttccttgattacaatacgacaggcgacggactgctttctgcgatcatgctgatgaacacgattaaaatgacaggcaagccgctgtctgagcttgcggcagagatgcagaagtttccgcagctcctcttgaatgtgaaagtaaccgataaacataaagtaacggaaaacgaaaaggtaaaagcggtcatcgaagaagttgagaaggaaatgaacggtgacggccgcatccttgtgcgcccatccggcaccgagccgcttgtccgtgtcatggctgaagcgaaaacgaaggagctttgcgagaagtacgtaggccgcattgcagatgtcgtgaaagctgaaatgggagcagagtaattttccgcagaagactgaagaacgagacatgctgatttcacataagataaagggaaccgttcaatcttggaaaaatgtgaaccattttgaaaaatgtttgacggttcctttagcgtatagtaaaatcagcttgtcttgtttaatttataaggaaaggcagggcagaaaaatttttatagttatagcgcccggactaagcgtacggatgaaacagcttagttgacgaggatggaggtttatcgaattttcggcggatgcctcccggctgacctcaaagatcacagccgcaaggatttcctcaaaccaaagaggcgactctttgaacaaagggaaattgcatgatcttccataaaaaacatgtaggaggggacgattgaaagtccccgcctgacaagcagactttcttcgtctcctgcctgcgactttaggaggaagaaaattatgtgtggtattgtaggttatattggccagcttgatgcaaaggaaattttacttaaaggtttggagaagctggagtatcgcggctacgattcagctggaatcgctgtagcgaacgaagacggcgtacacgtgtttaaagaaaaaggacggatcgccgatcttcgcgcagccgttgatgcaaacgtgaagtcacaagcgggaatcggacacacgcgctgggcgactcacggagaaccgagccgtctaaacgctcatccgcatcaaagcgcatcaggccgttttacacttgttcataacggcgtcatcgaaaactatgttcaactgacgcgcgaatatttacacgatgtaacccttaaaagcgatacggatacagaggttgtcgttcaagtgatcgagcaattcgtcaataacggccttgacacagaagaagcgttccgccaaacgctcatgctgctcaaaggctcttatgcgattgcattattcgatcatgaaaacaaagaaacaatctatgttgcgaaaaataaaagcccgcttcttgtcggccttggagacaatttcaatgttgtcgcgtctgatgcgatggcgatgcttcaagtgacaaacgaatacgtggagcttatggataaagaaatggtgattgtcacagacaaaaaagtcgtgatcaaaaacctcgacggagaattgatgtcacgtgcctcatatattgcagagcttgatgcgagcgatatcgaaaaaggcacataccctcactacatgttaaaagaaatcgatgaacagccgcttgtcatgcggaaaatcattcagacgtaccaagatgaaaacggcaagctctccattcctggagacatttcaaacgctgttgctgaagccgaccgcgtctatatcatcgcctgcggaactagctaccatgcaggtcttgtcggcaagcaatttattgaaacatgggcgaaagttccggctgaagtccatgtcgcaagcgaattctcttacaatatgccattgctttctgagaagccgctgtttatctttatttctcaaagcggagaaacggctgacagccgcgcggttctcgtacaggtgaaaaagctcggacacaaagcgctgacattgaccaacgtaccgggatccacgctttcccgtgaagcggactatacgcttttactgaatgccggccctgaaatcgcggtagcgtcaacaaaagcatatacggcgcaaatcgccgttctcgcaattttggcagccgtgactgcggaaagccgcggcaaagaactcggctttgatcttgtcaaagagctcggcattatcggaaacgcaatggaagccctttgcgcccaaaaagacgaaatggaaatgatcgcccgtgaatacttgaccgtaacacgcaatgcatttttcatcggccgcggcctcgactatttcgtctgcctcgaaggatccctgaagctgaaagagatttcttacattcaagctgaaggcttcgccggcggcgaattgaagcacggtacgatcgcattgatcgaagacggcacaccggtcatcgcccttgcgacacaggagcacgtcaacttaagcatccgcggaaacgtcaaagaagtgacagcccgcggcgccaacccttgcgtgatctccctgaaaggcctggaagaagcagacgaccgcttcgtcctgcctgaagtgcatccggagctcgcaccgctcgtctccgtcatcccgctgcagctgatcgcatactacgcagcgctgcaccgcggctgtgacgttgataagccgcggaacctggcgaagagtgtgacggtggagtaggagtcggttgaaataaaagtttgtacccctcttggattggatgttctggaggggtatttttatgtttgaaagaggaataagtcttatcaaaaatcgaagtgcgctagattgtaagtgaagcgcacagcggaatgccggggcggtttggacgatgctcgtatatatacttatcttttaaggaagtgtaaccatgaacaatgaaacgtacattgaagttaacagaacatcgcagcttatgaataaaatgagaaaatttacagtgctgattgatggtgtcgaggctggaaaaatcaaagatggcgggagactgcgaattgatttggagcctggcgaacatgagatccaagtgaaaattgattggtgtgtaagccaagctttgaggtttactttagatgaaggagaagtgttaaagtttagatgcggaagtccggttcgtgggtggaagatgttcttcggacttttttatgtattggccgatccagagaaatactcgtttattgaactggaagaataggcgattgaaagacggccttggtcttcatcatccccatcaaacgctgcaccgtaacaacctgactaggagtgtgacggtgcagtttttttatccgaggatgaatatgaagcggtgtcaatgatggaaaaaagccctatcctatttaaaacactttatttctataaatccgaatcgacagaagccatgaacacccatacagcgtaataattgatatggcaacgatcagatagagaaaagtattttgtaaggttagaagcatgtgaatgaactctctaatttgatcgttcaaattttggacgaaaaagttaatcgttagcatatataagccaaatgcagcaatagaagcaatcacgagatagttgcttttgaatttataacagaatggcagcatgaatgaagcagctgtcatcacaatggcaaccattagcaagatgtctttccagatcgtaaattcccggtgaatgatgaagtgtacgataaatatggctgcagccaccatagatgtaaagagaacgacgacaatatactttgaactgacaatctctttccgtgtataaggcaaagaattgagaagcatatgtatagaagacttttcatctattgaaaaggcatacatcgatataactatactaaatacaaccccaacccagattggagaaatatctaacattaaataaacacataataccaaaaacgaagccgccaatgtttttttctgcaagataatatctttaagaattaagttgaacatgttctttggctcctttcttcgtatagaacataatatcttcaagggtcggtttttctattaacgccatgtccccaaagattttttctgttcgtgatttattcgcagtcaatgcttcaaatccatgagttgattttcgaaccgctataaattcctgttcggtctcccggtctaacaactccattccgccttttacaattgcatattgttcctcaatttcgtaaaagtcctttgtaaagatgtgctctcctttatcaatgaacgtgatataatctgcaatcttatctaaatcagttgtaatatgagtcgaaaaaaagatcgtcttatccccatcttgcatgagctgatgcaagatttccaacagctcccggcggaaaatcgggtcgagtccggacgtcggttcatccataataattaattccgcatgatgggacaaagcaacggttaatgatgctttcattatcatcccttttgagaacgtcttgattttttttgtgagcggcaagttaaatgtgttcacataatcattaaatacttgttcatcccaattgacataggatcttttcacaatatctttcatttcagctaacgttaaatgttcataaaatatgttggaatcaaatacaaagccaatacgttgtttgatttctttctcatgctccttgtaattcatgccaaataccgtaattgttccgctgtcaggctgcaataagttcatgatcagtttaatcgttgtcgattttcccacgccatttccgccgataaatccggtgataaaacctttttttacattcatcgaaaagtccttgagctggaaaccatcgaacgatttatgaacatgccggagttcaattacattgtccatcattcttcctcctgatataaaatggtaagcaagtcttttaattctgtaagggtaacgcctatgtctttgctgttttttatcgctgccgacaattgctcttcgatggctttcatttttccttctttcattatttcgtcattctgatctgatacaaaagagcctttcccgactacggaataaatgaacccattcttctccagttcttcataagcgcgctttgacgtaataagactgacattcatgtcctttgccaattggcgcatagaaggcagcggctgtccgggtttcaattcattcgcaagaatttgatccttaatttgggtgtaaatttgttcataaatgggttgctttgaactatttgaaattataattttcattttaaaccctcttttgtttatatacaatatacacaatatgtacaatatacacaaagattgcttgaatggcaacgatttttttattctttggggagtgaattgtcagccagaatttgatgttaagaataaaagggcacaatacatattgaaaattttcgatatgaagatataatgattggtatggaacctattgaaattttcaaagctttatcaaatgaatcaaggctgcaaattttgcaatggctgaaggagcctgatcgtcattttaagccccatgaagggattgatatgaacacaatcggggtgtgtgtcagccaaatcacggacaaattgaaaatgacgcaatcgacggcttcccaatatctcgcgatccttttaagagccggcctgattaaggcggagcgaatcggaaagtatacgtactacaaaagagacgaagaggccattggaaagcttgctgactttcttaaaacagagatatgatgagcattaaaaaataaacatctcttgatgatgtttatttttacaccatacatatcgacatatttcgatgtgtttattttttaattttacatatcgttatttcgtgatatgtaaatgtataatgtgataaaggagcgaacgataatgtttagcacttggaaaatttatcttttagcaatcatcagttttttggtagggacctcagagtacatcatttccggtattttggatcagatcgcccacacactcgggataactttagctgcagcggggcagctcattacgatcttttcactggtgtatgctgttttcaccccggtcctgatggcgttgacggcaagtatggataggcgcaagttaatgatgtatgctctcggtttgtttgtgataggaaatattttggcttttaccctgcctggttatggttggtttgttgcagcgcgtgtcgttatggctttgggggcaggcatggttgtggtcacggccttaacgattgccgccaagatcgcaccggcgggtaagcagggcagtgcaattgctacagtcgtcatggggtttaccgcttctttgattataggtgttccactcggaagaatgacggcagaagcattagggtggaagtctgtatttgggggaattgctttattgggattcatcgcaatgattgttctattcttaacattgccgcatactgaaggcgataagcccgtccctttgcttcagcagctttcccttttaaagaaacggaaagtagcgatggggttatcggtcacttttttctggctcggaggatattccgttgcatatacttatctgtctccttaccttctgaccgtttcagggatcagcggcaatttgctcagcggcgttttgcttatatttggaatcgccagcttggttggatcgaagtttggcggatatagcactgataaatggggagttccttttacgctcgttggcgggatggcgctgcatatcatcgcactgattttgctgtcgcttgtcacccattcctatgtcggagtactgttgattctcatattatggtcgttcgccgcatggtctaccggcccgacgcagcaatatcacttagcgacgcttgaacccgaattgtcaggtgtattgctcggcatcaatcaatcgatgatgcaattcgccatggccgcaggtgcaggaatcggagggatttttgtagaaaaagtgtcgctggcttctattacgtggtttggggcattgggggttatgattgcgattgttgttgttttgacgaccttcagttcacggaaagcagcacatgtaagagaaatcagttcataatagccttgattggtgttgaagattcaagggtttcattcgtcatatcttacctgcttttttgagcctgacaggcagcgctgagccgaaaaatctagcatccgctcgctgtaaaacgagcggatgtttttttactcagctaaaatccgcaaataagctttccaaggtccgacatcatctgataccgcttcgccagcactcttgcgatttgcgagaggtgagtgagatcgtgggcaacccaagttgagatctgttctctaagcttgacgattccaaactccgggtgcatccccgtttgttcgaagtcggtttcaggatcaagaatctgtcgcaatgttttcagattcgcccgtctgatttcagcaaattcgttaagcagctgttcaatcgttttcccgtcgttttgattcaactggctgaagcggtcgaacggcggaaaagtttccgttgctccttttgtcacgatcattttgattcggggcaaccagttgtttttttctccctcaatcagatggccgactacatcaaaggcgttccaagtgtcttcgccttcatcgcagctgatccaggggtttgataatccggtcagcagctgactcaatgtttgtggtgtgcgctccaggatttcgatggcttcctcgagttgaaagttcatgtgaatgacctcctccttttataaaagatcacgtcaactgccgctcagcaaactcccgatacagcgcatgcgaagcaatcagctcatggtgccgtccccgccctgtaatctcgcctttttcgataaacataatttggtccgcgttcacgattgtcgatagccggtgggcgatgacgaaggtggtgcggccttccatgaggcgggcaagcgcctgctggacgatggcttctgattggctgtcgaggctggccgtcgcttcgtccatcattaaaattttcgggtcgcgcaggaaggcgcgggcgatggcgatccgctgtctctgtccgccggacagcttgacgccgcgttcgccgacttctgtatcaagctgctcagggaattgtttaataaatgtatcggcatacgccatttccgcgactttccacagttcttgatcatcaatgctgtcggcgtgatccaagccgtagcataagttctcacggatggtgccggacatcatcgggctgtcttgagatacgtagccgatctggctgcgccacgatttcatcgacagcttgctgatcggtgtttccccgatgttaatggctcctgagtccggttcgtaaaatcgttccaagaggccgaacatcgtggtttttccgccgccgctcggaccgacaaacgcaatcatctgcccgggatcgacgtcgaaagataccccgcgtaagaccggctcgccaccggcgtaagtgaaagttacattctcgacatgtatcggcagattggagatgtccatctcaagcccttcctggccttcttcctcttcagaatgcataatctcgatgatccgctctgttgccccttttgctttttgcagctgagtgaaaaacattgtgaacgatgtgatcgggaaaatgatttgaaacagataaagcaaaaaggcgatcagcgagcctgccgacatcgtcccttcagagacgcggatgccgccgtagccgatgatggcgacgatcacaatcataatgacaaggtgcatgaacggggagacgagcgcgaatatccgagcttccttgaggccgtattgaaagagctttgaaatgcctgataaccctttcattttttctgtatgctcggcgtttgatgctttcatcaatctgatttcgcttaatgtctgctggacatgtccggtgaaggaagctgtttcatcctgcattgttttggaaatgcgctgcattttcatgccgagcgggatcatgatgaaggtcgtgatcggaacggagatcagcataagaagcgtcattttccaatccatgatcagcagaatgaccacagatccgacaatggtgatgattccggaaacaaactgcggaaaatggtcggaaatcaagctttcaacaatgccggtatcattgacaactcggctgacggtttcgccgctcgtcttttcgtcaaagtagcggacaggaaggcgcagcagcttgaaccacatgcgctcccgcagggaagcgaccactttctgcccggcgtaagaaagaaaataggtcgaaaacccgtcgcagaccgcttgaacgataaaaacgagcgcaaggattcccgctaaggccagattgatcgaattggcggaaaagccgtcaaccatttcccttgtcaacagcggaatggacaagccgaccaaagtcgtgacgaggcttgcggtcaaaccggcgcttaaagccagcctgggtacgccggatgtgagaatcattgagaaaaacggtttcatgctattgttgttttctgttttcatttaataaactccttatcgatataatgtcaaagaagttgatggcgcaagctgtaacgcatcataatacgatataaacagctgaaagttcccgatcattgccgattttaactccatactaaaagtttgacagatgacataattgtaactattattgttacatatagttgattgggtgacaagaaaggaagaaaaacatgacaataaatattaaagtatattccgattatgtctgtccattctgttttctcggaaaagaccagctcgaaaaagcgatcgaaggcaaagatgtggaagtcgagtggctgccattcgaactgaggccgcgcccatcggagcagcttgatccgttaaacgacccggccaaattggcgatgtgggacggcgccattaagccgcgaatcgaggcttggggcgtcaatatgaagctgccgaacgtctctccgcatccttatacagatctggctcatgaaggctatcacttcgcaaaagaacacggtaaagggaaagcgtacaatgaccgggtttacaaagcgttttttcaggaagagcaggatatcggcgacatcgacgtattaacgtcgctggccaaagaagccggactggatgaacatgcttttaaagaagctttaagcgcaagaacatatcaggacgtgcagcggaaggcgctccaacacgcttacgaagaagccggcatcacggtcgttccgacttttatcatcggcaatgagcggattgccggagccgcggcgaaggaagtgtttgaacaggcgatcgaaaaagaaagcagacaaaaacctgttgacggcttgcagtgcgatcttgacggaaacaactgctaagcaggaaaaatgagcgatttgaagaaccctttaatagggttcttttttataaaggaaagaagagggaagacagttgacacttcatcattttattgcagccgatcgggagcttccgagaccaaacagaagaaggtttgattagcatcgttaagcttgatccaggatacgaaatggtcaaaacaaaactcagcaagccgtttgtatatgaggcaaccggctgtttacatagacccggaaatgacataagggcgctattcagctatatcaattcaaatattcccgagggtgaagatatagaagtttactcttgctgggacggtgaggaagacaaagaaaaagacgaccgcttagactttttcattgatatagagaaccttcagctgggcaagcatgtcaagctggataaaaagaaatacatcgatgaaattgccggcctgttttatttcgaggagcggcagctggtcaagattcgcaaataaaacacttgttggcacagggttttcacggtttttttcgccgtttcatttagatatccaatcaaggaggaatcaagatgtccgatcacaaagcggtacacatcgttcaagcgaaagcggaggggaaaactctggtcatggagcggagtttcgaggcgccgcgggagctggtgtttaaggctttttctgggtcagtgcatttggaaagctggtgggggccgaaaggatggcagactgccaacagcaggtttgagtttcagccggatggcgtatggctttactgtatggaatgcagagatcaaaaccaaggcgaattctatggccggaaatcttgcggcaaggctgtttttcaagagattgcggcgccggaaaagatcgtgtacacggatatgtttacagacgaggaagggaatgttgttcccggcatgccggagattttgaatgaggtttattttcaagagcgcgacgtggggacaaaactgattacacgctcacatttttcttctccgaaagagcttcaacagctgctggataaggggatggtcgaaggcttttcttcacagctggagcgccttgaagactacctgaaagccattcgctaaaagaaggaggacatgtcgatgacgtttttagagcatttcatataaccgtgtattcgcggacctcctcatcaagatttactacaacaatcaaaaagaggaggtatatacatgcgtacagagcaggaaatcatcgatttggtgctgaaggtcgcacgggaggacagccgtgtcagagcggtcggcatgaacggctcgcggacgaacccaaacgtcccgaaggacccttttcgcgattatgatattgtctatgttgtaacagatatgcagtcttttctcgatgagccgggctgggtggacgtttttggagagcggatcatcatgcagacgccggaagcgatggagctgtttccgaatgagcttggcaaccgcttttcgtatttgatgttatttacagacggcagccgcattgatttgattcttgtgccgcttgaagaaaagctggaatatagcagggaagacggcttgaccgtgatcctgctggataaggatcaggatctgcccgtcatcccgccgccgacggatcgggaatattgggtgcaaaaaccgtccccgcaatgcttcgccgactgctgcaatgaattttggtggacatcgacatatgtggccaaaggcttgtggcggcaggaaattctttatgcactcgatcatttaaatctcgtcagggccatgctgttgaaaatgctcgaatggaaggtcggctttgaaacgggcttttcgctgagcataggcaaaaatgcaaaatttttggatcgctatgttgatcaaaatacgtgggaaaggcttttggagacgtatccgccagctgattataagcgggtatggaacagtttgtttaagatgtgggagctgtttgaagagacagcagcagcagttgctgaacatctgaatgaacaataccttttcgcagaagcggagaaagtcagacagtatctgaggcgcgttcagcagctgaaacctgatgcaaaggaaattgactaatcaaatgatggccgcactcccggcaggtgagccgggagtgcgttttttgcggaggtgaacggaatgttcagtattaaaaaaatgctgcagaaccattatggaatcgacagtgtgaacatttctcccgagcaaggcgggtggacagcacttgcttatcaagtaaccgacggtgaagcggctttctttttaaaagtgtatgataaaaatagggcatcgacagcgaaatgggcagctttaatcgatgattacatccctgttctggggtggctgggggatcacaccgctctcaacgggaggctgcctgtgccgcttttgacaacagctggagaatacaagtatgaagatgacgatgcggtgtatatgctttatgaatacattgccggtgaaaccattggagatcagccgctcggcaaagggtgcgtggagaagctcgccggaatcatagcggagctgcaccgatatgatgagacgatcccggtgaagacagaaggaattaaagaaaaatatgatatttcgtttttagatgagatgacacaatggcttgatcacctgccttgtgagctggcgacactcattcaaccctacagcggagcaatccgcgatatgatggagtcagccttatccctggcggatgatttgaaatgcagcggcagaagattggctttgtgccatacagatgttcatggctggaatttgatgaaaacgggcggggaattgattctgatcgattgggagggcttgaaactggcccctgttgaagcggatctgatgttctttgctaaccagccgtatgctcaagagtttttgcgcgtttactgcgagactcataaaggatttgaaatcgatcagaacgctttgcggttttatcagatcaggcgaagactggaggacatatgggagtttacagagcagctggcgtttgacattcagacagagaaagaaaaggcagagacgatgagcttgctgaaaaacgagcttgaagccataaaagacagcaagaccggctactaaaatgctaaacggaggaacactcgtgaaaaattatcgtactttattttttgatgtggatgatacactattagacttcggtgcggcagaaaagtcagcattgcgaatgctttttgaggagcagcaaattcgtttgacagctgaaatagaagcgaattataaacgaatcaatcaaggtttatggagggtgttcgaaaaaggggagatggaccgcgaccaagtggtgaacacacgcttttcccttttattcaaagaatatggtcttgaggctgacggcgttttgcttgagaagaagtatcgcagcttccttgaagaagggcatcagctgatagacggcgcttttgaattaatcaaaagcctgcgggatcaatatgatttatatatcgtgacgaacggtgtttcaaaaacgcagtataagcgcctgcaagcttcaggattgtacccgatgtttaaagggatttttgtttcagaagacaccggttttcaaaagccgatgaaagaatactttgattacgtttttgaacggattcctcatttttctgtcgatcaggggctgatcatcggggattcattgacagcggacatagaaggggggcggctggccggattggatacatgctggatgaatccgggcatgatagcaaatgacactggtattgtaccaacctatcaaatacaaaaacttgatgagttgtattatattttaaacattgaaaaagaatcggccgccggccattgtttataaggaaaaacgggcgcattttgattggttattcaagatgcgtactgctttttgatattataagaatattctttatattgggatagttgtttcttaataaatagatagagtaaaatttgttctcctggaaaaaacaattgtatttttggaaggagtttattatgatggaataagtaaattttgagatatatactaattgtaattatcagatttttattactacttaatacgatgaagatgctttgtcatcatatagttttttgggtgacatcagccgtgtaagaggaggaaaagaagtggcgaacaaagaattgaagagaggcctgggcgcgcgccacatccaaatgattgcgcttggcggcactatcggcgtcggtttatttatgggatcttccagcacgataaagtggacaggaccttccgtcctgcttgcttatgccatttgcggaatttttatcttttttattatgcgtgcaatgggggaaatgctatatgtagagccaagcaccggttcatttgcgacattcggccatcaatatatacacccgttggccggatatatgaccgcgtggagcaactgggttcagtgggtgattgtcgggatgtccgagatcatcgccgtcggggagtacatgaagtactggtttccggatcttcccgcttggataccgggcattatcgcaatggcgattctcggaggagcaaaccttgtctctgttaaatcatttggtgagtttgaattttggtttgcgatgattaaaatcgttacgattgtattaatgattgcagcggggttcgggattattttcttcggattcggcaacggcggacaagcgatcgggttttcaaacctttggtcgcacggcggtttctttacaggcggattctcaggattcttctttgcgctgtcgctggtcatcgccgcttatcaaggggtcgaactgataggaattacggcgggggaggcaaaagatccgcaaaacacgctgagacacgcgatccaaagtattatttggcgtattttaattttctatattggcgccatcttcgtgattgtcacagtctatccttgggatgagctgaatgcaatcggtagtccgtttgtatccacttttgcgaaagtcggaattacggcggcagccggcattattaacttcgtcgtcatgacggcggcaatgtccggctgcaacagcggaattttcagtgcgggccgcatgctttatacattgggagtaaacggccaagcgccaaaattctttacgaagatttccagaaatggcgtgccgttatacgggacgattgccgtcttgatcggtttggcaatcggcgtcgttttaaattatattgcgccgcctaatatttttgtgtatgtatacagtgcgagcgtgctcccggggatgattccgtggtttgtcattctgctcagccatatcggattcagaaaagcaaaaggagctgaaattgacaaacatccgttcaaaatgcctttcgccccagtgacgaactatttgacgattggtttccttcttatggtattggtgggcatgtggttcaacaatgacacacgcgtgtctctgattgtcggggttattttccttgcggttgttgccgccagctattatgtgtttggaattggcaagcgtgcctcagctgatgggaataaataatgaaatttttaaggcgcttggggctgtcgagatgttattggcagccctctcaggcgctatgatcaagaaccagctcctggttcttttttttataagcttggctgtgtttcaatacgggcgccaatgatgggcggaaacccgcccgctccggagagcctctggggtccatttcaaacaacgggtccgaaagatgttgtgtttcaagtgaagccaagccacacagtaaaggcttatgaaaaggtataagggaggtcttttttatccaaaagaaaaagcccgcagaaaacaggagtgtctctgcaagcttaaaaaggccgctatgtgaaaaggtatgctgcgatacgtgtatcgccctcataagggcattgaagcgatcaacaccatcaataaattgatatggatccgatgagaagcgcgcatcctgtcatcacgatgacagcgagcaccgcccacattatcgcaaatttttgatgatcgtcgatggaaaccccgacaagcccaacaagcaaatgtgttgaaggcacaagcgggctcagcatgtgaatcggctggccgatgatggaggctcttgcaatttcgaccttattaacaccgtatgcgacagcggtttctgataaaatcgggagcactccgtaaaaataagcgtcattcggcatcagaaaagtgaaaatgccgcttgttaaggctactatcatcggaataaagccgcccatttgttcaggaatcatagacgcaagcgaaatcgccatttcatctaccatttttgtgcctgttagtattccggtaaagacccctgcggcaaatatcattgaaccgatagccattacattgctcgaatgcgccgaaattcgctgtctctgatgatcgaggtttggataattgacaatcaatgcgatgcagaacgcgataataaacagaacggtcaagcttacttttcctgatatgagaagccctatcaatgaaagcgtcaacaataagttgaaccaccaaagcttcggacgcttccactcatcctccgcagcggcggccgtttcattggcaccagccggatgtttgagttcaatcacgccgaggcgttttcgctccgcttttccgagcatatacgcaactccgatcatacaaagcatgccgcttacgatgacaggtatcatcgggccggtcaattcagccgggtcaaccccgagcgcactcgctgcccgcggtgttgcgcctccccatggaatcgtattcataatccccatgccgactcctgcgattcccgctaatataatcgggcggatgccaagcagcaaatagagcgggagcatcgcgctcgttgtaatcatatatgttgttgatccgtctccgtccaatgcgaccagcatcgtgagcaccgcagtgccgacgacgatttttaacggatcgcctttgaccatttttaatatttttgtgaccattgggtcaaacaggccagtatcaatcataatcccgaaatataaaattgcaaacataatcataacggcggttggcgcgacttgctgaatccccgaaatcatcatgtcgccgacatcgctgaatccgaatccggcgatcagcgcaaacactatcggtgtcaagactaatgccgtcagaacagaaagccgttttgtcatgatcaataccataaacacaagcatcatgaaaaaacctaaaattgctaacacagttattcccccctcatatgaatccgcttacatttttttctctcctgttccccctaagccttgccttttttgtcatcatatgagaagaactttctgaagtaaataatttggtttttatgtatttttaattttttaaaatcattttgtttctttttgaccatttttaaatacataaaaaaagtattccgcagacgcgaaatacccggttaatccccagccatgatgttttgataaaatgctgattgctcctcaaggaatcgttgcgtctccttgctgtttaaataatagctttcccattcctgttcatttattttctgcttccattccggtgaggatgtgatctttttaaacacttgatcccagtaggaaatttcttctttggtcatatttttcgggcctaatacacctctccaatgggaaaatacaaacgggatgccctgctctctccacgtcggtacatgcggatatgcgggaagccttttgtctgaagtaacagccccaagtgtgatgctgccgcttctttcatatgttttagcttctgatagagtcatcgatgcggcgtcaatttcatgtctgataagcgcctgaatgagctcttcgctgctttcatactgtaaatattgaatgttaaaagggtcaactccgtacatatcggccgccctgacgaatgacagctggtcatcattgccaagtccgggggaaaaaccgatttttaccttgccggggttctttttgatctcattcagcaaatcctttccgctctttatttccgatccttttggaagagcgatcgtctgccattcttttgcaagaatcgccagcggggtgaaatcgtctgttttcagtttgctctgtccgagaatgtaattgctcagcattaagctggatgtcatgccgatggtgtacgtatcgctgctatttatatacttccagcctttgtcaccgccgcttccgggtttatagacgatcttcacttcgctttttatcacttgtttttgtttaaggacggattgtatcgcctgagccgttaaatcccagccgcccgaaggctcagcgggtacgacgatttcaaccggccctcccgggggacgcggggcggacgattgtctttcatcccccgacattaagatcaatagacaaatcattataatcgcaaagttcttcatgtttattcatccgccaaatagtattttctctccggtctgccgataattccgtattccagctcagcgcgcgcttcttcttttgacacgagatattcggcatagcggcgggctgttgtacgtgaagcccccattttttcaccgagttcttcggctgtcattcctttagctgcgtctcgcagaacatccctgattttttgcagtgtaatcgaattgatacctgtcggcaaatcctcagcctgacgggatccgctggagaagtctccgaagatttggtcaatcattgattggctgacctgtggctgagaaagcagtgtttgcctttttttcttatattgaagcagcacctgtttgaatttttcggcagtcacaggcttaatcaaatagtgcacaattcccgcccggagcgattcctgtaaatgacatgtttcggttgctgctgtgatgatcatgatatccacttccggaacccggtttcgaatgacaggaatcaatgttgtgcccatctcatccggcatgtaaatatccaacagcagcaagtcggcctttcggacctcgagaatttccattgtttctttggcattggccgctttaccgataatgttgaatccatcaagctgttcgatcaatctttcatgaatttgcgctacacggaaatcatcctccgcgatcacgatatcaatcaaatggattccccctctcgtgtttgcttctccttcggtataaaaacggtaaataccgctccgccgcctttttgattggccacttcaatccaaccgccaagttcacgtacagattcctttacgttggccagcccgtagcctctcttcatcccctttgaagaatatcctcgttcaaagatggctttcatcttatcaggcgctacgccgcatcctgtgtcagccacttctatgacaatatcgcggccgatgtcagtgatgaaaaatgaaacaagccgcacattttgctcagctacggcttcgaaagcgttatcaattaaattcccgatgatcgtaatgagatgagacatcccgatatgctcaggaagcggctcaagcgtgctgttttcatcaatggacaacttaacttttttctccgaagcctttcccattttgcccaacaggatagcctgcacttgctgagaatgaatgtttttgaataaaatgtcgtgctgttcattttgaatggcgtattcctctttaatcaggtcgatcgctgcttcatactcacctagctcaagcaggcctaggatcacataaagcttatttgagaattcatgtgtttgcgcgcggagatcttcagagtatttttgcacctctgtcagcgtgtcaatgagcctttttaactcggttttttgacggaaacttacgacaattccgtaagtttgaccgttttggagcatcatttttgtatttaaaataaacacttgatcgttgacgcagacctcctgattcagcaacatctgccgctgctgaaggacagacattattccggctccgggcaggatgtcatcaattggccggttgaccacaggttcgggaagcctaagcatttccgctgccgatacgttcatcattgtgacgactccttcacggttggtggcaatgatcccttctttaatcgcacgcagcatcgcatttcgttcacggtaaagagatgcaatctcttggggttcaaggccaagcgtatcttttctaatgcttttggcaagagcggcggcacccgcaaatcctatgagcaaaacgagaacagccatgaagctcaattttctcacattctctttaatacgttgttctgtctcgtttaacagaaaatcaacagacacactgccgatgaccttgctgtaaccactttgttcctggataatcggcgcacttcctctgatcaccatgcggccatcgttttttgtttcagagatgtgagagccgccgaacaagatttttctgcttcttgtcagcttcgtttgacctctcttttccgaggcgattttgatctctcccttttcgttgaggacataaatagtataggcaccggtctgttctttcatttgttcaatgacctcttgcgcctctcccttatgcccgcgcttcttttgaaagagctcttttaccggaggcatataagaaatggtttttgcagtctgaacggcaagctgttcggactgttttcttccttcttttgtttgctgaacggcaaacgtgactgtcagcaagccgattactaagataagcagtgctgcaatcaagcccataatttttgtttgcagagaaaaattgacccgttttttgaccacaggcaccagccgtcctttctaccaaaaatcataccactttttattcggaaattttggcatttttaaaaatatcctttgcaagataacgaaaaagcccaagtatatcttataagtgatgatttcataatgcaggatcaggcgtaggacagtgtgctgttagtttcttaagctgggatccggttttattccacatataggtctaaatccagaagaaagtctgcctccggccacaagaaggagcttcgcatgacgattgaaggaagcagctgtcctcgcgaacaccgccccgagaatagctgctggctccttgtgttgttgtcataaattgaaaaaccattgattcacacattgagacggcccgtctgctgctgttgactactaaaacacctcaccaaacatgcgctcaataatattcaacagtacaacccccggcagtttacggcgttccacagccggtcgagctttgtaaagaacccatttaatggaaattgagatgacgtccgttatagaggatattcatcggtcgaatcgatcatttgaataaagttaagggcagatggagatagatggtcttccgtccttacacatagcgaaatcgggttctttattacggctttatcaacatgaacctttgcgatgtctccgcgggcgatatattcgtttacttcaagagcggatacgaatgttgcaccgtatccttccataaccgttctgattgtttcgtttaatccgtttatttgtacacccatatttggttttcccgcgttatgcaggttgcacagcgaaatcaatttttcccgcgaaaaacttccttcctcgcgaaagacgaaaggttcttttacaatctcctctaatgccacgtgttttgaggcgaatttatgtttttgattgactacgaataacatgtcatcttccaaaagcagcgttccttttaagaaggggccgaattccgttgtcccgccgatcaggccaatgtccgcttcgtagttgatcagctgttcacaagctttttgaaaattcgttgtcgtgatttcaacttccgttttcggaaattgctgtttaaatcggctgagccatcttggcagcaaataattggcggggaggaaggtggaggcaatacgcagttttccaattgacccttcccttaactgctccacgtacgattcaatttctttttcaagtgaaaacagccgcttggcctgttttgcaagctctgcgccagactgtgtcagcaggatccctctgcctttaggaacgaataaggtgcagtcgatctcgcgttctaatttcttaatttgcgaggtgacggcgggctggctgatacttaactgtttggcggcttgagtgacactgcctgtttcagcgaccgaatagaacaatcgcagtgcatggagattcatatttcacacctctatttataaataaaagttattaatactagataaagatatattagagttatctaaatacttttactattataaagttgaaaaacatgtattacaagaaaggagaaattgttatgagtacgcttatcttaaataaaacagcttatagcaagtctccgtatgatgtatggctgaagggactggatgaaccggtggcgatgctgacctcaaccgatcgtgcggatgaatgcaggaattatgatgtgatcgaagcatttgacgattatccggttaatggatgcatcgaaatgcgcgctttggagctgaatgaaacgtatcactttaaaacgattattgcatcctcggaatttgatatgctgagggcggggaagctgaggtcgcttttggggataaaagggcagtcttacaaaagtgctctgctgttccgcaacaaaatattaataaaagagcaagtaagaaaagccggtgtgaaggttccagattttaagaaaatcgactcggcggccgacttatatacgtttgttcaaactttcggttttcctgtggtcgttaagcctatttacggatcggggtctgttgatacaaccgttttaaggaatcggcaggacgtgtggaatgttcttgcgaaaggtcttcccgatcatctggaagttgagtcgtttatcgaaggggatatgtatcatatagacggcctcatccttgatgaagaaattgtcctcagctggccgtcgcgttatatcaacgggtgtctagcgtttcaagatcatcagtttttaggcagcctccagcttgaattgaaaaatccgcttacctggcggttgactgattttgttcaaaaagcgcttgctgcccttcctgttccgaataccacaacattccatgctgaagtgtttcatacaccagatgatgaactggtgttttgtgaagtggccagtagaaccggcggcgctatggtccgtgaagcaactgtgcagactttcggttttgatatcaatgaagtgtgtgttaaagcgcaatgcggcctggaatttcatataccggaggtggacaacaatccggaccgcctaagcggctggctgttgattccgccgaaagacggcgtgctgaaagaaatcaagcctgcgccagccgcagactggatagcgaaacaaaatatacgctcaagccggagacaggttccacggctcgtcttccagtgtagacgcaattgcaagctgtttaattatcggacgcacagaagccgaattgagaggccgtatcaaccggcttgcaacgttgttccatgatcataccgtatgggaaaagaattcggatgtttgcgcaatttaaagcattcagccgccttcatccgttgatccgatttttgctgataggcacgcttgtcacgaaggcggctaagtcgatgacaaccccgtttttggcgctctatctccatatgaaaacgggagccgattttggaaccatcgggcttgtcatcggtttaggctatttttcaagcactgtaggaggggtagtcggaggagcgctttcagataaaatcggcagaaaaaaagtgatgctttcatccattttcatctggagctttgtattcattctttttggacttgttcatgatttcatgtggtttttattgctgaatattttaagcgggctttgccattcgtgttttgaacctgtgtcaaaggctttgatggctgagttatcagaacgggagatgaggttccgcattttctctttgcggtatttggccatcaatgttggagccgctgtcggccctttactgggcgcttattttggtcttgccaaaaccggaacgccgtttatcatcacagggctggtctattttggctatgccatacttttgagcttgatgatgattcggctgaccacggtgaaagagacaaaaatcgctcctgaaaaagtccaggcaggttcagttttgaagacgttaaagcaagacaaggctcttcgattatacatagccggcggcatcctttttttgttcagctattcgcaaatggaaagcactttgctgcagtatttaaataacgactttgcaaacggagttaaaatattttcgactttaatcacgttaaacgcggtgacggtcatccttttacaagtgccgctcacccgtttatttgagaggtataaatccttaacaacaatatcaattggaaccgttttttgcattttggggaatatcggtttttctatcgcaaatggctggattgtttttatgctttcgatgtttgttctgacaatcggcgaaattttatgttttccttcaatgaatgtccttttggacgagctggctccggatcatatgaagggcgcgtattacggcatgcaaaacttatacaacatcggtgagtttttagggccttggctggggggaatgatgcttgccttgtacgggggaaaagccgtctttcttattgctgcgtgttcagtctttttggctttaggcgcttaccatgtgggaaggagaaagtttttatctgcacagcattatggtgtatcgcctttttcttattgaaaatttaggccgcttatgcatgaatcattaagaattacccaacctaaaaggtaaaaaaggagtatgaatcatggacacaacattgggctacctccgtgagtcactgtcgaatcaccttgaacacggcataggacaaaacatttacagaaaaatcgtttccgggcgatatgccaatgaggaagagtttgtcgagcacttggaggagcgggaaatggaatttctgaatcaagtgcttgaacatgagatgaaatatgcgctgaatgaacaggaccataaacggacaagagaattaaacgaagtgtatgaactgctgttttgaaaggcgggaatgatcaatgggtgcaatagagcggaacggatacacgtttgaaccggaatacagcgtgaccagacaaaacggtgcgatccatgtataccggcgcggccggtttgtcgaggagattccctttgagtttcacggggagtttccagagcatgatttaattgaagagcttgtcaatcattattgttatgaaaataaaatataaggcttgaagaggctgccgaccgggcggcttttatttttggatttttatatctataatccgcttgcagttttttagaacggcagcagaaaagcggccataaatatgacagctcatgcatcgctattttttcttttcgtcgtagtattgaacagggtacatggatccttccgataccattttgttatcttcgatatcatgcggagacgggtgtcctgctttttcaaccgggaatgaatctacgttgtgtttttccgaaaagtaagggatcttttctttgacgttttgcaagtacgatttcagtttttgtctgtttgtttcgtctttgagcatatatgcagtgactccggcgacaacggcgagacctgagatcagattcttttgcttcatggtcataacccctttcgattaggtgtttgcaaatgttattcccatgattgccgccggttaaaccagctgatcgagcgcttcgtctatattcgtcgtcggctgcctgcaggcgaaattttcacaaatatagacagtcgttttgttatcgactgctttgtattcggccgcaaagtcggcaatccctttgaaatcgtcaggcgattctgcggcgaggacggcataattcggctggaaggcctgctgcaaagcgcttacgatcttctgtctgtccggatcattccgttttccgagcacaacgatttccttttgcggcatgacttggctcagcaaaccttggagaaagtttgtatggccgctcggataagcagagacgtctccatggaaggcagcaaacatttttgccgcttgatcatggagcgacaagtcgccagtcagcctgcccagccgggacagctgcacggccaggacgccgtttccggacgggagggcgccgtcgtatacttctttatcccgcacgatcaaagcctcggcatcgcttcccgtaaaataaaaaccgccgtgctcttcatcccagaacagccccttcatgtctgcttcgagctttttggcttttcgcaaatcggttaaatcaagtgatgcttcatacaattcgatgtaggcccacagcaggaaggcgtagtcatcgataaatcctttatttttcacctcgccgtcacggtagcggaccatgatgcgaccgtcttgaatcaatttattctcgataaactcggctgcagctcgcgccatctccaggtattcgggcgcattgtagactttcgccgctttggcaagacccgcgatcatcagagcgttccaagaagtcagcactttatcgtcgacatgaggatacgttctttcctgacgtttttcaaaaagctttgttctcgcttcttcaagcttgttctgaagctcttcatctgtcagcgcgaattcatccttgatgtcttccagcctggtgtagatcaagtttggaatattatggccttcaaaattcccttcttgcgtgatgttgtagaccgcgcaatacaattcgccaagttcatctccaagcgtttcaaggacttcttcttttgaccacacataatatttgccctctacgccttccgtgtcggcatcaagcgctgaataaaaagcgcctttctcatcggtcatttcgcggcggacaaatgtgatgatctgctcggaaatctgtttataccgttcgtttttcgtgatttgataggcttcagtatatgcgatcagcaataaagcattatcgtaaagcattttttcaaagtggggaacaagccattcgtcatctgtcgaatagcgggcaaacccgtagccgacatggtcgtaaatgccgccgttcgccatgctgtccaacgttttcatcacgctgtacagcgcgttctcctcgccgctgtattgatgatagcgaagcagaaatgtcagcatatgggggattggaaatttcggcgcgctgccgaaaccgccgtacgccgcatcaaagctgttgatcagctgctgatacgtccgcctcaatatgtcttcgccgagcgaatcgccggcatcgcttttcgctttgattctcaggttgttggccgctttttcagcaatatcttcaacatgctcccggtttttcgcgaaggtatcggaaagctgcttcaccacctcaacaaaccccggacggttaaaacggctcgtcttcggaaaatatgtacccgcataaaacggcttctgatcaggggttaaaaacacattcagcggccagccgccctgccccgtcatcatctggcagatcgtcatataaatcgaatccacatcaggccgctcctcgcggtccactttaatggagacgaatttctcattcagaagcttcgcaacttcttcatcttcgaagctttcatgagccatgacatggcaccaatgacaagtcgaatagccgatgctgacaagtaccggcttgttttcgcgctttgctttttcaaaggcttcttcgccccacgggtaccagtcgacggggttgtgtgcgtgctggagtaggtatggcgacttctcgttgattaatctgttcgttggcatgggatcacctgctttataaacgaatttttattcattattgtctttacatgatttaatataccaaatatcaaaagaagaggtttctaagcttaacttcttctattttattttatggaaagagaagcagatcaactgttattaaaagagctcagttaattcttaagatttttcgcccctctttcttcaggttttgaatttaaagtatgattataaattattcaaaacaaaggaatgagacaaattggggctatatattgacggagaaatagaaaagcagaagaacccctcgcgccgaagcgtcttgtttgccattttggttgttaatcgttgccgataacgtacttgcatgcggtagtgcacggacgataatgctatgccgaagcgacataccgaatcaatgaaaaaattcaatcaagcggtcgccgcccaccccaattagaatccctgctgattccgatcggtgacggactgaccgtgtcgcaagtcaagaaataaaagcacatcatctgactagttactgattcggtgactagtttttttaatgcccgcaatgccgccacaatctaaaatcggaatatgataaattcagttcataaaatgttgaaggggacatgcccttagcaaattgacaaaaggttcttttgtagtaaaattcaaactattcataaacgaaaggaaccgcagggattgaaagcggggacaaattttaaataagaaggtgttgaggtggcggggtattctgaacgaacggttgagagttacatagattctccggatcgattaaagagattgtacaaaagagtattattcatcgtgagtctgtcgcagattttcggcggtgcggggctggctgccgggattacggtaggcgccctgttagcaaagcaaatgcttgggacggatgcgttttcaggagtcccttctgccttatttactttaggatcggcaggagccgctttcggcgtcgggagactttctcagcgttacgggcgccgcacgggcttaaccgccggctttatggtcggcgggatcggcgcaatcggggtcgttgctgcggccgtgatcaacagcatcatattgttgttcgtttccctgcttatttacggagcgggcacagcgacaaacttgcaggcgcggtatgccggcactgacttggctgataaaaagcagcgggctaaagcgatcagcgtcacaatggtgatgacaacatttggagcggttgcgggccccaatttggtggatgtcatggggaaatttgcttcgatcatcggcgttccgccacttgcgggaccgtttattttatcggcggcagcttttattctggcagggcttgtgctttatattttgcttcggccggatccgttggagatcgccaaaaaaatcgaaacctatagacaagaaaataaattagcagacgaatcgaagtctgccggtgcttcggacaatcaaaaggggattacaattggtgccgctgttatggtgcttacccaaattgtgatggttgcgattatgaccatgacgcccgttcatatgcagcaccacggacacagcttgggagatgtcgggatcgtgataggttttcatatcggttcaatgtatcttccgtcacttgtcacagggattcttgttgataaaattggccggacagccataagcatcgcctcaggggtgaccttgctgctcgctggtgcagtggcggcgctggctcccagcgattcgctcgttttattgatcgttgccctttcgctgcttggattgggatggaactttggattaatcagcggaactgcacaaattatcgattcgaccgagccttcaacacgtgcgaaagtgcagggaacgcttgatgttttgatcgcattggcgggggcttccggcggggctctttccggaatggttgtcgctcattcaagctatgccttgttatccttggcgggcgggctgttatccttggctctgattccagccgtcatttggccgcgaagaaaaacaaatactcaaaaagggtaggaaaaggtctatcggattcggggcctatcggacatcgccgccgggctttcttaatttaaaaacgatgaaatcggggcacctgagatcttcttcaaatgaagggtattttttcagcatctcttttgacggtctcggttcctcgaccgcttctaattgaaagccggctttgatgatcgtattgatatagcttgtcagtgttctgtgaaaaagaaacattttctcctcgccgcccagcggctgctcatatgcgccttcgtaaaaataccgatcaacgttccaatggagcttttggccgtctttggttctttcccatccgctttccggggtgacgaaacaagggtgtaatattgaaaaaataaagcatcctccatcttttaataacctgtgcatttcctgaaacgctttttcatcatttgcgaggtcttggatgaccatattcgatatgatgatatcaaagctttgctcatctaaaaaatgcaagtcctcacaattgccgtgccgataatgaatgtgcaatccgtccggcgttctttccttggcgatctcaagcattcttgtcgaatagtcaaccgccgttacaactgcttcgcgggcggccagcgttctgcttaaatatccttctccgcacccggcatccagcactttttgatttttcaccgtttcaatgagagaaaagatgacggggttcaaaaagacttctttatgtatatcgccttgttcagtatggtttgcagcatagctatctgcaaaccggttccatctttgaatggcttcttcagtggcagcgttttttctcatatcacttcctccttttgacatgatcataccacaaaccatattacgttttagccaggttaaaggacattcctgttgacaaagcagcctatttgtaattatgatagttacatcaagtgtaacgaaatttgttacagatcaagattaaaacattcaggaggaattcgaatatgaaaatgctagtaacgggggcaaccggaaaattaggatcgaaaattgtggaaaagctgctggaaactgtaccggcggatcagctggcggtcagcgtgcgcaatccggaaaaagcggaagcgctgcgggcgcgcggggtcgatgtgcgccacggggattttgaccgcccggaaacattggaatccgcatttcgaggcattgaccgtctgctgattatctctgccgatggagacaatgagacgagaatccgtcagcacggcaatgcggtagctgccgcagagcgcgccggagttcggtttatcgcttatacgagcattgcgaatgcccgcgaaagcaaaaacttccttgcgccgactcacaaagcaactgaagaagcgattttgcaaacggggattccatactccttcttgcgcaataactggtacttggaaaatgaaatgtcgagtattcaaggcgttttggcgggagccccttgggtgacatcagcagagaatggcaaagttggctgggcgctgcagcaggattacgcggatgcagcggcagcggttctgtccggcgaaggccacgaaaacaccgtttacgaactttcaggcaaactattaactcaggaagaaatcgcttcagcccttggggaagtattgggcaaagaagttcccgttcagcatgttgacgatgctgcctatcgcgatatcatgaaaaatgcgggtgtgccggattttctgattccgatggttgtcgatatccaaaaaggcattcgtgaaggcacacttgaagtcgaaagcgatgattttgaaaaagtgctcggccgtccgctcacgccaattaaagaaggattggctcaaatcgttgcaagaatctcagaagcgaaataatgatcaataggattcgaaagagtgatgaacagaattacagtgttcatcactctttttttaaaagatagatcaaaaaagactcgccacaatcaccgcacatactttatgcctaagttacttttattaaaataagtaaaatatcgactgaattccagagctaatgatgaaggaataaaaagacaggcatgtgcggctgcttgagaagaaaaactgaaagctgatggcagcgcatgaatttgcagtgtgtattaacttgtaaagagcctcgatagtagcctctgtttggattgcggctcatccatcatcccccgcgacagtttcactattaaaactcacaaatatgcacctgaccgttatttgattttcctttgctgtattaaacctatggccacaagcatgacagtgccgagtaagacaatcggaagaaaccacccgccaaatccgcttccccagtctaaagcgattgacacggattcaattaatatgagagaaaaaatgattaagcatgcattttttaagcggttgatcaactttcggctgagcaggtagaagtgttcagcgtttgtttcattcaggcgctttggatgattgtgaatctcagggtgcttttctaggaactgcatgaacagaaggataattaatccgatttccggcaatatgaaaagctcccattttgacccccagcgatccacttcaccgagtgcgttgtaatgtgcaggcaccttttcggggagcgatccccagacagcggccaatagaatgatcgatcccaggtaaaagaaatagccaaatgcgttccaaacccgttccccttttgtcttttgaatgttgatcttagaaccgtcggctctgttctgcatatgtaaccctccttagttttaaatacggtttgacctatgaaaaagttcgggattttcgccagctggaatggggtatatttgcggtgagtccaggcaatgttaagggaatgtaaatcatcagccggcaatgttaagttattgtaaattttcgatttgaatcgtttacataggctttaatctccatcataatcatagtgtttggtttgtagatttatgtcgaattaggggggcacgactttggaaatagatgtgcagaaattgctttttgaattcattggaggtctcgggatctttcttctcggtattaagtttatgggagaaggacttcaaaaatcagccggagataagctgagagacatattagatcgttttacaagcaaccctctgatgggtgttttggcaggtatgattgtcacggttttaattcaaagcagttccggcacgaccgttatcactgtcggtcttgtcagcgccggctttatgaccctccgccaggcgatcggcgtcattatgggtgcgaacatcggaacgacggccacagcctttattatcggctttgacgttggggcatatgcgcttccgatcatcgccattggttcatttttgctgtttttcttaaagagcaaaaaatttcagaacatcggacaaattctgtttggatttggtgcgcttttctacgggttggaattaatgagcagcgggatgaagccgctccggacggttgaagcttttcatgatttaacagtcagcatgagtgcgaatcctattctcggcgtgctcgtcggcacccttttcaccgttctcgtccaaagctcaagtgcaacgatcgggatcctgcaagggctgtttgccgattcattaatagatctaaacggcgctctgcctgtattattcggagacaatatcggtacgacgattaccgctgtactggcatctcttggcgcctcagtggcagccaaacgggccgcggccgttcacgtattgttcaacctgattggaacagcgattttcctgatcttgctgaagccgttcacagctttgattttaatgcttcaatcctctttagggctggaccctaagatggtgattgcgtttgcccacgggatctttaatacgtcgaatacgctgattcagcttccgtttgtcggcatattggctttgatcgttacgaagctgattccaggcaaagattcggttgtggactataaagcaacacatcttgatccgctgttcattcagcagtctccttcaattgcgctgggacaggcgaaagaagaagtattgcgcatgggtgaatttgcggtaaagggacttgaggaaacaaaagagttttttaatacaaaacaggcaaaacatgcgcaaagcgcttttcaaatagaagatgcgatcaacaatttggacaggaagataaccgattacttgatcgaattgtccgccactacgctttctgaacaagaatctgaagaacatcatatgttaatggatactgtcagagacattgaaagaatcggcgatcactttgaaaacttggttgagcttggtgagtaccagcaatccaacagggtgaaaatttccgaagcggcaatggctgatttaacggaaatgcttgacctgaccatttccactgttaaggagtccatcaccgctcttggggaaaataacgaagatgccgcaagacgcgtagtcgaaaaagaaaatcagattgataaaatggaacgcaagcttcgcaaaaagcacattcttcgcttaaacgacggattatgcagcggacaagccggcgtgatcttcgtcgatatcaccagcaacctggaaaggatcggcgaccatgccgtcaatattgctgaagctgttttaggcgaagaaaagcattaaaaaaccgggagtcattcccggttttttattttgtgggccttttttatcaagatgttacatatttactaaattgcgagaaaaaaggaagagaattcttcttctggagacgtaaatcaagtataatggttttattctttaggaggtattaagatgcataaatacagaagaagaaacacaacggcctttacggttatgtcatatttcacatttttcgcgggagtctttttatttggtatcgggctatacaatgcggacaatctgcagctcaatgaaaaaggctattacatagccgtgatgattttagtggcggtcggcgcgattttgacccagaaagtgacgagagacaatgccgaggacaatgaaatcattgcggagcaggagagaagacagaatttgtctagcggcgagtaagcataaaaaaagcatctttagggatgcttttttttaatttgaaatacttttatatttattttccaaaacgaaatcaatcattccaataatttttgtatggttcgttttttttctaaagtgtaaaaagttttgttctttgtttctttgagatttagtgatcgtgccgaacacccagatggagctcatgataagtaatatcgataacaaagccggaaaataaccttttgaaacgtcgggtaaaatggaattggcttgacccgaacatacagtagttacaatggaggcgaatatggaactggcgagcgaagctttgatcacgtggctgatttttagcgtaggacctgaaaaataaactttcagccggtttaacgtggataaatcttgtttttcgaggtatgccatcagctcttcatcgttttcagctttcgataacaatagagtttcagcggtttgttttgtttcttcgaatagttgtttgtctgtttgcatgtcttggtctccttcttatttagtttgaatgatagagaatcaaagcagaggtgaatgttcctctgctttctaattgaattcctttttaaagcgttcatctaaaatgaaatcaatcatacccgtgattctggaatattccgctcttttttggaagtgcaggattgtttgcatcggtccttttcgcgaggagatcagcatcttgacgatccaaagaaaagagaagatcagatagaacatgaagaagaatgaaaatagccttgaaagaccatggttgagggaggagatctgaccagataaaaaggccgccataatgacagcagtcatactgctaaaaaaaatccctttaatcaaatacgttaatgtaaaacttggatttgaaaaatagatttttagctgatttaatgtaacagattcttgatttgcaaggtatgtaagcagctcttcgtcacttttgtgagactcaagaagtttggctgtatgttcagctttttgaaataattgtttttcgtttctcattggattgtcactcctattcataaaaaacatgagattttattggttcggtatattttttaatgcctttttgtatttttgttgtaaaacataatcaatcatttttacgatacgtgcaaactcggctttcttggaaaagtgtgtaatgaattgaatcggcttttttttcaggatgacaagctgtctaagcacccagaataaacaccccgtaaatatgacagctaatattataatggagatgccggaaatgaaagggaatatcgaatctgcttgaccagaaagaattgcagttatgaacgaagccaatattatactgaaaaatgctgcactgatgaaataatgaagcgcaaatgaaggatctgagtaatagactttcagctgatttaaggtcagtgaatcttgtttagcgagaaaggctaatagctcttcgtcgctcttatcgcggtaagttttaagggttttggctgttttctgcgtttcaatgaatacttgtttgtctgtgttcaatgttaatgcctccacgatacttgatatatattaaagattagaaaaactgcataaatatattatattatgtatttatgcagttttcattaaataaggaaattaatgagatattagttcgccaaatattgcaaataacacagcagacaacgccgtgccaatagcgatttcagcacgctattacaacagctgcatccccgattgttcttcttttctttcattatgctttcactaatagatctcaaacatatgacataaaaaaatacggaaattgactccttcactaaatgaagcgaagtcaatttccgtatcttgtttatctcaacagccccaagcttcctgtcagccgcgcaacttttttcttatccccgcaaatgccgattccaaaatagcggtaatcggaagctgcggtgctttgaaatgcctcaatatatgcttcatatgtatgaatgctttgcgctacatcggtgaaatcaaccgtcagaatatcgttgaattcgtcggtcagcagcttttgacttaattgatgaagcagctcggcattgccttttaaaatggggattgggattttgacgatacctaaatggtcgattcccgagccgtctgttacagtttctccaatcagatcgggtttgtttttgccgagggccgcccccaggatggcagctgtattggcgattagcccgagcggcaggctttcatcgatgatcagtgcgcattttgtctcttccctcaaatttgttcctccttcagctgcggttttggttttgtttcagaaatataaacgccggccaatgtgagcgctcctccgcaaaaagcaacccatgtcagtttttcttgcagaatgataacggatgccgcaatagtgatgacgggcaccatatagatataagcgctcgtttttaccgctccaagcacaccgaccgaccagttccatgtcacaaagcaaagcgcagatgcgcccgcgcctaagaataggatgttcaaccaattgacgggggagtaaaaagggcttgcgtcgaagcggaaatcaaacaggaacagagcgggaaccatgaatagcaaaccgtacagaaagatccgctgtgtgcattggattgtatggtaaccgaatgtgctgatttttttcatcaaaatcgcatatgccgcccagacgaatgcggaggcagcagcgagaatgtcgccgagcggattcaatttaagcatcatttgtccattaaagaaaatgagcgcaagtccagtgaaagcggcggcgaacccaatgaaaaagcggggctccagcttttcgcccgaaaggagaaaatgcgccaataccgcggtgatcatcggaataaccgcgacgatcatgccggcgtttgaggcgtaggtaagagtaagcgcgatgttttccaacagaaagtaaagcgtcactccgcataaacctgctcccgcaaacagcgcttcttgcctccagctccggaaagtcagcacatgcggatgcaccatgatcagcacaatcaacccgatgagaaaacggtaaaacaatatatctacgggcgggaaatcctcgagcagcacctttgttgagacaaaagtagtaccccagatgatgatcgtgatcacagctgcgaggtgtccggcggtttcgcgtcttgtcttcatcctttgatctcctgcctgtcatattcaaaaattttcatatattgtttcggcgtcagcccgacctgccgcttgaaaaattttgtcatatggctctgatcactgaagcctgtttggaaagccgcatcgattggttttacgccttcttccaacagcttcttcgcatgattgatacgaacggtttccaagtagctgtagggggaaattcctttctgcttcgtaaacgaccgcaggaggtgatacttgctccagcctgtcagcctgcttaaatgttcaagcgtaatgttttcctggtaatgggattccaaataactgcacaccgctttgacttcgtcggacggttcaggtgcattttcaagaaacgtgacatcagaatacgtacgaatcagctcttcgagaaggttgagaaaaagctcctcttttttcaaggctttttctttttgcaatatttgaatgtgtagctccttcaagctggcgttcagctcatggcggaacaagacattctccgtgaaatatgggaggctgtcggccccagtgatctccttcacaaatcctctcataacatcaggcatcacgttaatgcagcggtaatcgagcgcctttccgtcaatctgctcgcaactgtgcgtgtcataaggattgaaaagcacgagatcgccttgattaatgatgtattcttctcccttgcaaagcaaatagcgctgccccttctcaataaaaccaatcacaaaatactcgtggaagtgattcggaaacttctggataatgcctttaaagcggtaggcttcaacatttagatcagggccgaggaaaagcgtgcgggtttcatttcgcatggcgggcctccttggtgtgatgatgtttaagtttatcatgtttatgggagatttcttgtatgatgttgcttaatgaaaaaaaggatacaatggaagaaaaaaagaggtactgaaagtgaaaaagaaatggattgcatcaattgccttcacgatgatgctgggcatcggaatcacgatttactgtctgttttttgaacatagcaaactgagcgaactgacttcagacggggaatgggagctctcgtattctaaagaaaggggagatcaatattggaatggctatgtttcgaagaaaacgagtgaagatgcggagttaaagagagtcgtgttttttgtgaatggaaaagagacggttgattacgaaaaggatgagcaagaggaaggcggaacacattctgatatagtcaatgttgtctggttaggtgatgccccagaaaaaagtgagcaatttgaagctgtcgtggaaaggaaccagaatggtgaatatcataaggagaggattaaactgacagcaaaaaacgggttataaagattgaaccattgtaacttttggtgtaaaattacactaaaagttacaatggaggttctccatggataaagaatacataaccgaactgatctcatccaaattaagattaatccgggcggaaagcggctatacgcaggagaaaatggcgaacgtgctcgggatgtcgaagaaaacgctcgtgcaaatcgaaaagggcaggtcggctgcgggctgggcgcatgttgtcgcggtatgcgcgctttttcggaacagtgaagtgctgcaggccgtcctcggggatgagccccttgaggtggtggagactgttgctcaccgaagcatcgacagaccaaaagggaagacgcttggcggaaaggtgtggtggcgggacattgagaaaaaaggagagtttcgccttcagcaaaacttgatttctcaccattaccgcatcttggattcgtatgacgacctatggttcagcacgtttgaaaagcaggatgcagttgcgcgtttggacgagctgttaaatgagcaggacggggtggaatgatgaaaaagatagcagaggcatcaaaatcctctgaattggctggtcttgatccccgcaagacaagacacggggaataacactgcgtgtctcatctggggaatcggacgtgagaacagttttcgcccgccttattctcactccagcacatcatcaagcagcttccacatcagctccctccggtttcctgcgcccgtcttcaaaaaaaaacgatttcaagtggtcttgaacagtgtaagccgatatatgcaattcgtctccgatggcttttgttgatagtccgcggatgacccggtaagcgatgtctttttcccggtcggacaggctgtaggcttccgctatcagcggaatggtttctgcgggtgaagcaggctcaaatgaaacggcgatctggcctgacggtccaaatccgtctaaacggctcgctttaatggataggcaggaatggcctggaatcgagatgaccgtttttgccggagctgtagtttcagccgctgcgcgcgtgcagacggctcggacgggtctcggcacggcttcgctgccgatgctttcccagccgcgcaagatgttcagccaatggagggccgctcgattgcatgacaagagctgcaggtcttccgacaaaatcagaatgcctccgacatgtttcatgtgaaacacgtctttttttggcagatggtgtctgaattgctgaagatgccggccgataagcggtgcaagagaagcgagcaggctctgatccttttctgtaaacaccggctgtccacttttcctcaggcagtgtgaggtgtatcccaagcactgccccttgctgagcggtttgtgatatcgtttgacatcttgttagaaagtgagatgataaatattagaaaagaatagaaggagtggggaaatatgcagcctgaagatattgtcagaagcggtccaaaccaatacgtttgcagagaggggatcgtgaaagaactgccgtcatttgcgaatgcattcgaacgtcctgtcatcatttcaggggttaaatcgtttaaagcttttacacgttatacgacgcctccagccgattggaaagtcgttcagcatacgggctgcagttccctaaataagattaaaaaagcagcagaggaagcagaatcagcagacgtcatcataggaataggcgggggaaccgtcttagatacagcgaaggcagccgccgatttgctgaacattgaagtcatgacgattccgacgatcccgggaacatgtgcggcaagcacgccgttaagcgtcatctatgacgatgaaggtaacttttcgggcgtccaatatcataagcgctccagctatttgacactggtcgatccgctgctgcttctctcttcaccggtcgcttatgtgaaaagcggaatcggcgatacgcttgcgaaatggtatgaggcagaagcgatcatcagaaatacggccgattcgctttctatcatggttcagacagggctgaggcagtctgtctatattcgggatattttgttgacagaaagcctgaaagccatagagagccttgaaaaaggcgaatcctccccagctttcacaaatgtcctcgaagcggtcattgcgctggcaggcacagtaggcggatatgcgggccgctacggcagaatggccggggcccatgccattcacaacggcttgacgttcatccccgaaacccatcgtgtgctgcacggccaaaaggtagcctacgggatactggtgcagcttgctttagaagggcggacagatgaaatagccgaactgattcccttttatgaagggctcggttttccgagaagacttagcgatttgggcattttagaaaatattgaagcggccaaacggatcatcgccgcccatgccgtgcgtccggatgaatctttatgtttgatgggatcttttcatgaagcggatgtgattgcggcgatagagtcgcttgaataaacccggttttatacgcctttgaactattcaaaggcgtattttatttttagcgacttcttgagaaaaaatcactcttgtaaacaaggtctttatcactatatttttgtaaaaaagtatcagctgccgccgatataaataaaaactacaagaagggggagcaatgtgaaaagcccaagatggaacaatatcacaatcggcggcaaatacggcattattttctttgtgatgttaacagcgtttttaacatccgttttgattacatatggtctgttaaaagatacgagacagacggttcaggatacgaaatcgaaaaatgaaacggccgttcagtcggcaaagctgatgtccctatatcaaaataaatatttgcacattccggagtacatcataaacgcccaggatgaaaagctgaccgattatatgaagtacagccaggaatttgccgatacggccaaaaagctgaaaaaagagctgcattcggatgagcagcttgacatgttcgatcaaatcattgaaaacaatcattcactggatgagtactttttcagcgaaattgttcccaacgtgcagcaaatcaacaccgagaaatttttaacccttcagaaaaaagcgaacaagctcaaagaggagacgatgacgttaggcgaaagcttgaaagaaaacgctgtcaaaaccaatgttgagtcaattggacaagcccaatccaatatgacgaaaaccatttatattttaggcgtctcaattctgatttcggcgattgtgtcggcaggactcctgatcattgtcagccggcagatcaagaaaagtctgaagcgtgttgtggcagcaagcgaagaaattgcaaagggtcatttgaactttgaagcccttgattacaaaggaaaagatgaaatcggccagctttcgcaagcggtgaatcatatgggcggaagcctgcgtgagatgatcgtcgaagtatcagggatcgcagccgaagtcgacaagcaatgtcttacgtttacgagcgtctcggctgatgtcagagaaggaagcgaacagatcgctgtcaccgttgaagaattggcaaacggggccacgaatcaggcaaatgaagcagctaatatttccgagcagacacaggagctcaccgggcaaattcagcacgctcatgaaagcggcgaaacgctggcccggttttcaaaagaagtgcttcacgtgtctgtcgacggcgacaaacagatggctcaatcattggagcaaatgaatgtcatcaatcatgtaatggaagcatccgtagaaaaagtcagtgtgctggaggaacagacacagtcaatccacaagcttgtcgaaatgataacaggtatggccgaacaaacgaatttgctcgcattaaacgcgtccatagaagcggcaagggccggcgacgccggaaaagggtttgccgttgtagccggcgaggtgaaaagactggctgaagaagtgaaaagctctgtcggcagcatcaccgaaatcgtcacggcgattcaaaccgaaacatcttccatggccggtgatttaaaaaccggtttttcagaagttcataaaggaaaaaaccagattgagacttccggccgatacttttcagagattaaaaataaagtgacggatatggctggccgtgtatcggacatttcggaggcattatcgcatttcagacgttcaagcgaggagattaacggctcggtcgagcatatcgcggcgatttccgaagaaagcgcggccggttctgaagaaatttcagcgtccgtacatgagcaaagcggctcgattgaaaagatggacgaaagcgcaaggcttctgggagagatggttgaacggatgaatgtgatgatcaaacggtttaagctctgatgccgatacagaatggggggttttaatgttgtcgatatatgtgaaaagagggctgttggcacttgcgctgttcagtctcctcacagctgttgccgggtgctcattcaattctgctgaaaaaagcgccaaccgtgaagaaaaagtaaagctgattgccgactccgacaaattgtacgtcggttttgccatcgatacgctgaaggaagaacgctggtacaaagataaagaagcgttcgagaaagaagttaaaaacctcggcggggaagtcaagacgcttgccgctaacggaaataaagaagttcagattcagcaggccgagctcttgatcagcgaaggcgtcgacgtgcttgttgttgtaccggcagatgcggatgccgcggcggagatcgtgaaaaaggcgcacagcgccggtgtaaaagtgatttcgtatgaccggctgattcgaaacgcggatgttgattattacgtttcatttgataacgaaaaggtcggggaactgcaggcggaagcgattgtaaaaaaagcgaagaaaggaaacttcgtatatatcggcggatcgtctcttgacaacaatgcggtcttattccggaacggcgccatgaaagtgctcgaaccgttgaagcggcagggtaaagtcaagctcgtgcttgacgaatatacgaaagactggctgccagaagaagcgaaaaagaacatgaaaaaagcattgaacaagacgagagatatcgacgccgtgatcgccgccaatgacggtacggctggcggggtgatcgaggcgcttcaggaggcgggcctggccgggaaaattccggtgtccggacaggacgctgaaattcaaggcgtccgacgaattgtgaacggtacgcagacgatgaccgtttacaaaccgattcccgcgcttgccaaaaaaagcgctgaaatggctgttcaagcggcgaaaggcgaagcgattcaaaccgatacaaccgtcgaaaacggcaaagccaaagtaccggcgattttacttgagccgtatgccgttacgaaaggcaatatcaatgagactgtgatcaaagacggccatctgtccaaaaaagatattaataaataaaacgaagtcagccatccgctacaggatggctgactttgttaaatttccactttcacatcggcgcttttcttaagcttttcgacctgctgtccgagtttttcctgtcttttttgctgtttgagcatatcttggatttgctgtttgacatcgtcaaacgcaggtgtgtttttctgtccgctgtctttttgctgtgcggcaaattgatcataatagtctttgatttctttgtctgtaacctgatctgtcggcagttctttgtcaatatatttctctgttttgatgctgtcggcaatgtcgcttttcagcgtgttcatgtttaagcctgcttttttgaccgcttcctcaaaatcttgctcgtttttatactgctttttgctttcgtccagctgtttttcaatttctttctcagatgctttgtagccttttttgtccgcttcctgcgtaattaaagcctgtccgatcaggctgtcgatcgcctgctttttgatttgctgcgccgcatctttagaagtcgggtcctgtcctgtttgctgatattgcatttgagcggttgataatacgctgttatagtccttgcctgtgatcttttcatcgtttacgacagccactgtttttgtgtcatcaaccttttgctgatcaagctttttctgcattgcttttatttgcttttcctgatcctgctgcccgctttgtgcggttttcgcttgatcgctggcctgggattgctgatcatcatgatttgaagagcaggcgcccaacacgacagccaataatccgatcatgagagatgatatgctttttttcatgatatatctcctttcttcaaacagaagtgaatcttaaaatgacctttagtgggcattctaaacgatcgtctctgaaaaagaaaccatttggaatcaattttccaaaatgtaatcgaattgaaaggagatcgtaatgtgatgaccgagttccggtttacttgatatgcttcgaatcaaagccgtacacttcaaagtccttcgcaaaaatgtcgtgcaccaattcttttgtttcgtcattgtaaaagctctcaaaagtcggaaacgcccagtcgaaggttgacatagtcaaaacagtgtcagcaaacttcccttttttaatcataatgtctgacagatggtgcggtgattgtgacagctgtgataacggagatttcaataatttgtatttgttttcaatctctctgatttgtgcgctgaattgctcgaggtaaatataattggtgacaaactcttcttctccttcgatatactggggaccaaggtgtcggtcaatggcattgatatccgtcccgagatcttttagatgatgcaaaaattgcgtgaaagaaagccctgtgtttatatcactgttgaacagacaaataaaattcggggagcaaatcgctgccagaaaggaactgactgctctccgaaaagggttgcgtacaaccttgtaagtgtcctttttaccctctcttaaatccgtcagaagatccttcacataattcggcttctgcgtatagatcgcatttctgtagtggtgaacttctccggcgcatcttcgattgacatcttcaagcagaccgttttggaaaaagaaccagcgattcagcgtcgtgcagccgctttttggaatccagaacagaatgatcggaaaatcctcagcataaagaggggtataaaggtaaatcaagcgattcagtctctcatcttcaaacatacagaacacatccacttcttacttggttttgggcgcgcttgagacagcggctgcctttatacacaaaatatgccgccggcaatgaattgatagggcgataatataaaaatattttaaaatgataagaccggcagttaaatccttattgaaccacatatagaaaattaagttatattttaaaaccattttatgatactagagtgagcctgtacaattcatattgatggaatttttttgtttcactgcatgctccccctgaggtaacataaaaatgagagatgcctggggcaaaatagcttgcaggaaaaaggaagggagggtatccatgcagattcgcatgactgaatatcaggttcccgaccccgaatcggggccgtacggtatcacagtatgtgcaaacgggcgcatttggtttactgaacaaaaggggaaccggattggtatgctcacagagtccggggatatcaccgaatatacgattccgacggagagcgcaggcgcctcgattattacgtccgggattgacggcgagctttggtttacagagtataaagcggggaaaatcggcaaaatcacgcctcaagggaaaataaccgagtatgctcttccaccgggtgctgccccgtttggaatcgctgcaggctgtgacgacgccatgtggtatacagatatggccggacatcaaatcggcaggctgtcctcttcaggcgaaataacagaatacaaactgcccaaaccaggagccttcccgtcatttattacaaggggagcagacggcgcgctctggtttacacaaaaccaaagcggctccatcgggcgaataacggcagatggagacatcagcgagtatccgctgccccaagaacaatccggcccggtcgggatcactgccggcccggacggggctttatggtttacagaaataaacgcaaatcaaattgggagaataacggtctcaggaaagatcagcgaataccagcttccgacagcgcatgcacgcccgcacgcgattgccgcaggcggtgacggagcactgtggtttacggaatggggcgcgggtcaaatcggccgcattacagtcgacggggatattacggaatatccaatcccgacggcagattctgaaccgcacgggatagcggccggatcagcccattcgatctggtttgcagaagagtgcggccgtattgggaaaatctctatccaaaattaagaaacgtccagccaactggacgttcttattttattgttattccgttctcgtttccattctgcggttgggcgagccaaggcctttattcatcaagtaaaaatggaaaatgtattcaccgatcgccatagcgacagctgcaaaaaacgcggccaatgcagcggtgttggcagccgttcccatcgcaagagccatcagccaaacgacaagaaaagcgacgcctaaatcggctaaagtggccgtgatgttgttggttttcggcagaataaacaaatcacccagcaaataggatactgcgccaagaacaatcgtgatgaatagggtgttttcaaaactaaaactaaacccgagccctagaacaaggtacagaatcacaatcgtcatgatgcctttgatggcaagggctttcacatgttccataaccattcgctcctttatacgggattttagtttttcttttcctcgtattcagaaaatgaaacatgcaaacttgcattcttaacgggctcagacggattccagctattttttcggtttgttgcataatagatggtatagcataacgccataaacggcacaccgcaaaaaagggcgatcctttggttcggatcaaaggcaatgccaatgcaggatgccaggcatagcagaaaagcggcaatcggtacggccggataaagcggtgtccggtattttaagtcgtctgcggtgtttccctcagccaaaaagcgtctgcggaacatgaactgcgaagccgcaatgctcatccagacagcaacaacggcaaaccctgaaatcgacacaagaacgatgtagacggaatcaggcgcaaacacgctggagagcagcgacagaatgccgccgagcatgctgaagatcagcgcgttcaacgggattccccgtgaagtcagcttttgaaatacggggtgcaaagttttttcttttgacagtgaccagagcatccgggagcatgcatacaagcctgagttggccgcggaaagcagagccgtcagaattacaaagttcatgatgtcggccgcatatggaacaccgatgcggtcaaagacgacgacaaatgggcttttgatcacaccggcttctttaaccggaatgaggcacgaaagcacgaaaatcgttccgatgaagaaaagcaccagtctccagagtgttgtcttgatcgcttttggaatgttcttttccggttcggcgctttctccggcggcaattccgatcagctccgtacccgaaaacgcaaaattcacggagagcatcgccataaaaattggaaggaagccgtttggaaagagaccgccttctcctgcaaagtttgaaagaagcggtgcagcgtctgcattttgtatcgggatgatgccgaatatcgccgctcctcctaatataataaacaatataatggcaagcactttaatgcttgaaaaccaaaattcggattcggcgaaaaatctcactgagacagcattgagcgcgaaaatcagtgcagcgaataccgcgctccacatccagactgaagtatcggggaaccagcgctgcattaataacccggcagcggtaaattccgaaccgagcgcgacagcccaggtcagccagtatagccaggcgacggtgaatccggtgcccggcccgatgaatctggaggcgtacatatgaaacgatccggtgacaggcatggcgaccgataattcgccgaggcagagcatgacaaggtagacgatcagagccccggccaagtaggctagaatcgttccggcaggaccagcctgtgagatcgtataaccggaacttaagaaaaggcccgtgccgataacgcctcctaaggaaagcatgataaggtgtctcgtttgcatttttctttgaaagttctggcgattggtgtttgactgttccattatacctctagctttctcgcccaggcggcgacggctttgatgtcctcaggcgttgttctgcagcagccgccgatcagctgtgccccttggttataccagctgcgggcgctttctccgaaagaagttttacatgccgcgccatgccatgttttcgtttccgggtcatactgttcaccggaatttggatagacgataatcggtttagctgtatgctttttgatgccgccgatgagcgaagagacatgctccagccgcgtacagtttactcctactgccgcaacctggtcatgctgatcgagccacttcgcgcattcgccggctttcgtaccgtcgctgatatggcgtccgtctttagcgctgaaactgatccacgcatgtgtatccgggaactcttttaataaatgaacgatagcttttgcttctgaaaggcacggtattgtctcacatgccaaaatatcggcgcctgcttcgattaaagcgcccattctccgcctgtgaaaatcggccaattcatcttctgtgacgccataatttccctgatattcggaaccatccgctaaaaaggcgccgtaagggcctactgaagctgctacaaacggtttaggccggccttcgcggttttccggagccgcccagaattcatcgcgtgcttctgcagcaagacggacagactcccggatgaggtggagcgcttcttgttcgctaaggccgcgttttgtgaaaccctcaaccgtcgactgatagctggctgtaatcgcgcaatcggcgcccgcacggaaataatccagatggacttgtttgataagctcggggttttcgatgagaattttcgcagaccacaggctatcgttcaaatcacagccgtaccgttcaagctcggtggccatcgcgccgtcaagtataatgacagaaaattgttgtaaagaagttcggatcggatttgtcatctcattgttgaggctctgtcgttcgagaccccggcctccttttttagtagttttttaaaatatatgaaaaatagtttaaaagactcgggaggcttttgtcaatctaccaatcatcagttttcaccagtcacttttgtcgttttctatttagggtaaaaccgtctgccgccgcatacttttttaaaaaaacagataaggggtatcggatcgatgaaaaaactgattatcaatgctgatgattttggatattcaagaggtgtgaactacggaattattgatgcctataagctcggaattttaacatcagcgacctttatgacgaatatgccgggcgctcgtcacgcggcccggctggctcgcgaatcgcccggacttgggatcggcgtacatttggtgctgacctgcggaaggccgcttttgtctgaccaccggacgattgtcgattcaaagggaagttttcgcaatctcgcattttatcaaggtgcttttacaatagatgccgatgaagtataccgcgagtggaaaacgcagattgaaacatgcatcaacatgggcttggaacccgatcatttggacagccaccatcacatcaatgcttatccgggcatttctgacgtatttttgtcgctcgccaaggagtatcgcctgcctgtcagacgtaatatggagagcgccataataacggaaaaaggagtgaaaacgacagactctttctcacctgtccttgaagcggccttaaagggtgaagaagccgtcactgaactgtttgaaaaacataataccgtggaggtcatgacccacccggcatacctcgataaggagcttttgacgaactcttcatatacttatccaagagtcgatgaacttgagtttttaaccgatccggacgttgtcatccgcttgaacaagcttgcggatgtccagcttgtatcatttaggaatttgacataaggagaatgccggaatgaaacatatacttcagctgcttggaaagtctttgctgattccgattaccgttcttccgatcgccgggctgctgctgcggctttctgcggaggatatgctggatatacctctttttcaagcgtcaggcgtgattttgaacaatatggatgttctgatcgcgatcggcatcgccatgggctttgcccgttcaaaagataaagggattcctgcgctgacaggatatttggcgataaccgtgttaaaagaggggatcggcatcttgaatccggcccttgatatgagcgtcttcggcggggtgctcgccggcctgatggcggctttcatttataatcaatttcaacatgcaagactgcctagcatgttttcattttttggcggagagaagtttccgattacaatgatcgtattggtgacgattccggtggcaggttttttttcggtcgtctggccttacgcagaggcggcgatcgacgcttttagccagtcgcttgttggtcttggcgctttcggtgtttttgtgttcggatttctgaaccggtttttgcttccgttcggacttcaccatgtcatgaatacgtatatatattttgggcttgggcgctatgagacggcatccggagaagcggtgacaggggaaattacacggtttttgaatggagacccgacagccggctactttctcggcggtttttttatcacgatgatgttcggcattccggcgatcgctttggcaatagcgcatgcagccagaacgagaaaaaaagaaacgaaagcactcatgtcttccggagcagccacatcgctgatcaccgggattacggaaccggttgaattcacgtttttatttacttcgcctttattgtattttcttcactcggtctatacgggacttgccggagcggtgctctgtttgctggggattcgtcacggcttctcatggggagcgggcgccatcgattatttgctgaatcttaatttgtcagacggcggattattgatcataccggtgggcgttgcttttttcgcgctctattatgttacgttttactttgtgattataaagcgaaacgttccggtgatcggaagggagcaggaaacacctgaaggagaccggctgcagcagtctatggcggcaggtattctcaagtatatcggcggccgtgagaatgtcgtcacttgtgaaaactgtattacccgtttgcgactgaaattaaaagacacgtcattggcggatgaagcccaattaaagcgattgggggcgcacggtgtgatcataattgaccggcatcatattcaaattgtgattggaacggatgcggggactgtaaaaaaagacttgcagaacttgatcgacgaatctgctccggattaaaaactgaagttgcttttgaggaatctgcgcagcatcgtacgatttttgaacaaataagcttgcacctccagcagcgtgaggctttatgatggatatgaatcgtcaattggaggtgactcttatgaaaaaagatgagtattattcaatcggtgttttctcagaaatgacagggacatccattcggacgctccattattacgatgaaatcggcctgttgaaacctgaaaaagagacgggaaccggccgccgtctctacacagacagagatgcgaaagatttgcagaagatcatatgttttaagtttctggggtacagccttgaacaaattcgcgctttcatgaaggatgcatgcttcgatgctggtctgattgaggcgctgcaggagcagaaaagggtgctggaggagaggaaggagcatattgaaacagggctgaaagcgatcgacaggacgatcggtcttctggaagaggaagaggaaatcgacagttctgttttcatgagcctgctgaacagcatccagacggagaaggagcagcgcgaatggcttgaacagcaggtgtctaaaagttttgccgatgatgtattcggcaaatcagaggaagagatggccaaattggatcaagagtatgttcgtttatctaaggaagccaagcggctcatgggaaaaccggttgatgaccccgaggtgcaggacatggcagaccggtatatgaagacgagtttggagtttgtcggagagggcgtgctgtcggctttaggacagatggagacaatagaatcgcggcagctggcagagaaatttccttcaccatttacaaaagaagaagaagagtggctgcagcgggtgttcgaatattatatgattcacaacgatttctgtcccgaaagcggcggatgaaaaaaggcagttccggcggaatttaaaacacgccggagctttttaatgcaaaagctccggctcaattttcgtcgtttgattatcgagcgaaacatgcagttcatggttttgattaaccgaagcgaaaaagatttcatccattcgttcaagccctttcttcttcagctggtttttgagccagctttctgttacattcaattgctgaaggacagacgtgtacacttttccgtcaacgatgaccggatatgaaaattcgccgctgcttttttgaattcccatatcttcagctgtgatttccattttatttggctttttgtataccgttaaatttccgttcgcctctacaaacgccatttctacgtcgctgacattgaaaacgtctttttcccgaagcatttgcagaatattatccactgaatatttgattcgtttcagattgccgacgataaacgttccgtttttgatgacgatggtcggttcaaatgtaattagacgtcccagcgttcggtatttgatcatgagatttgaagcgagtctttgcaatagggcaatcgcagccaccgcagcggcggtatgcaaatgttcaatcttcggatcggctatgtccgctccgacaacggcacccaatgtaataatgattaaaaaatcaaacacaggcatttctccgatagagcgttttcccatgaacaatgtgacaaccaataaaagcggaaggatggtaatgattcgcccgtagacaaccaaaatttctttcacagtttccattgtctttcttcctttttgtagccttttgccaattcaaggttgacggatgtcattttggagttgagatcatgatatggataggaatcggttatttctggcagccggttggcatcttcctggtttgaaatcacacgacccgccgagacaaatcgttttggggggattgtaacaccgattatttttgctcccggttcgatcaccgtatcctcctggatataggcatcaaaaacaaggctttgcatcccgacaaaaacatttttgtcaattcgaacggggccgtaaatttgacattgcggggcgagtgatactttctcgcctatgtaaatggaatacgattcacgatccttaaaaacggaatgttcagtaacagggctgttgtattcatagtttttcaatccgtgcaagacaactccgtcctggatattgcagtcatggctgatgaagatttttaatcccacgtctcctctgatcgaagagaaaggcccgatgaaaacgttgcgcccgatgaccacactgccgatgaccgaggcgaaatgatggatgtaagaggacgcatcaatgtccggaatatctgcttcttgattaaatgacgccgtgatattggggctgacattatcttgaatcagcaacttttcaagaaacttgccggcgagtgatgaaaccgttaatccaaggatgagtttgctgcttaatttcatatgacctgcctcctttattcaggtagtctgcctaaaaaacgggaatattatttaataaaagcgcggcggcggtctgaaaccaaaaaagaggatatggaggagacaacggctaataaagcaatggagtatgtttcactaatcaattggtgcgggaattttgggaaaaccgatgaaaacgggatcgcccgttttaacaaacacacggaaacgattgccctgaggatctattttaaatgaggagagattcgaatttgaagctaaaaaagatgggcaaatcgtaaagcatgcggtagagaatcataaggaagagacaaataccgcagctcctcctgccaaaaaggatagagacactggacatgtcgaaaaaacaggaggcaacccgctgtcgaatacaggaaatgccggtctgtatcgtgctttactcattggacccatctttcttattatcggacttgctatgtttgttttaaaccgtaaaaagactcaaaatcaaagtgtgtaaatattccccaaaaagacggcgttacggttgtctttttcgtttgcggaacagcatttcgcccgcggcgcctgcggaaacgccgagcacataagccaataaatcgctccacagaaatccataaccgagaatgagccctccgagcggagcggctctgatattgtcaatccatggagcgtgatacagctggctgcattcgatcaaaaaacaaaacaccagcgcgatcagcgccgcggaagccgtcttcgcgtttttgaacagaaagcctgcgccgaagaaaatcatcagcgcccacagcgcatcccctaaatatacattcacgatgtccggcagcatatcggccgtctttcttgaagcaagccccgccgccattgctgcgaatgtcagcgcaagccggcctatcaggcttcttttcatattcatggctgaaccccgtttctgccaaagcaggttaagtaaatcttcggagacatgacggatacgagaggaaaaatgttttataccttttggcgtgaagcggttttaaaatgaacgtgaaaaagccgccgtacccggcggcttttcgtgttatatcgcattttttctttcggatttttgttcggtgccggagtgctcccagcattcgatgccttcatggtttttaatgacatctttataaaagaccgggtctttgcccgctttgcgctgtttcacatagtctttcaaggcggcaaatgccacttttgacagcaggaaaatcgcaatcaggttgacgatgaccatcaggcccatgaacaaatcggcgaggtcccacacaagctggacttttgataccgatccgaagatgaccatcgcaagcacacagatccggtaaatgaagagccatgctttgttcgtgtgcaggaattcgatattcgtctcgccgtagtagtagtttccgatcaaggtgctgaaagaaaacaggaacaccataatggcgagaaagcctgaggcccatgctccgatgtgcgtgctgagcgacgcttgcgtcaactcgattccgctaagccccggctctttatacgcatcggaaaacaaaatgataaaagccgtgcttgaacaaatcaccaaagtgctcgtaaagactcctaaagcctggacaaggccctgtttgacagggtggctcgtagtggctgcggctgcggcattcggcgcgctgcccatcccggcttcattcgagaagaggccgcgtttgatcccgttcatcagggccgcgccgatggctccgcccgccgcttgttcaaggccaaacgcatgaccgataatcaaagagatgacgtccggcagtttcgtaatattcatcagcatgacgaaaacggcgacgccgatatataagacggccaggcatacgacgatatattcggacagcttggcgatccgtttgattcccccgaatgtaatgatgccgaaaacaatcgtgatgataattcccagtgtgagacggtctgtcccgaacgagttttcaaaagcgaccgttattgtattggactggaccgcgttaaacacgatcccgaaggacaatgtgatcaagacggcaaaaaccgcgcccatccagcgttttttcaagcccttttccatatagtaagcagggccgccgcggaagccgtctttatcctttattttataaatttgcgccagcgtgctttcgacaaagcttgacgccgaaccgatgatggcgatgatccacatccaaaagatagcgccgggtccgcccaaggcaatggcgatcgcaatccccgtaatatttcctgttcctactctcgcggccatgctgatgcaaaaagcctgaaaaggcgaaattccgtttttgtcgggcgttccttcctttaaaacacggaacatgtctttcagcaagcgaacttgaaagaacttagatttaaaagtaaaaaacagtcccgaagcaagaagcataataatcaatagttttgaccaaagaaaatcatttgtgacaccaatgacttcttgaaggaattgctgcatgctttcacctctttttttgtaattttaaaaaatactgagatcccattcacgggctatatgttttaaaagcattccgcccgtcatgctgtttccgtaatcgtcaatcgccggaccatagatgccgatgccgcatccgtgctgaaaaggctgttctcttttcacgctggcgggcaccgcgcacatgattccgccggagacgccgctttttgccggaatgccgacaaaggccgcgaattttcctgatgcattatacattccgcacgtcagcattaaagcttttgtcagccgcgcgacatccttcggaatgacatgttcacggcggaaaggatggtatccgtcatttgcaagaatcatgccgatcaaggcgatgtcttcagtgcttccttccatagagcattgtttcagatagacttcaagcgtttcttcaacgtctgcttcgaggaagccggtttcctttaaataatgggccaatgctctgttccgatgggcggtctgccactctgaccgaaagacttcctcattgatctcaagccgttttccaatcattttttcaatgacgtcatgaagcgactccatttttcccagtgccgattcaccgggaaggatcgacgaaacggtcagcgctccggcgttgatcatcgggttaaacggctttcccggcttgtgcatttcaaggcggatgattgaattgaacgcgtctcccgtcggttctacatcaacacggtctaatacgtaagaaatccctttcgtcaaacacgctgcgataaagctgatcaccttcgagatgctctggagtgtgaatgatacgtccgaatttcctgctttgatcatcgtttgatcagagccgatcacacagatgccgagctggttagagtcgatttttcctaaagcgggaatgtattcggcgttgcgtccgcttgaggaaaaaggacggtaatgttcgaccaaatcttcaaggcgggattgccagaagcgggcgtcatagcgttcttccaatacttcattcatcgaaattcctccaatcctgacctgttaaagcctgcaggtttgctgaaaaaatacgaggctctaaaagcggtgatttgagcatggcggcagaaggcaaaggggtaaaagcctgtgccgcacaagttgttttaaagcctgttctttcctgggaaaaaggggtttggattgcacaagggagtgagttgcggaaaatataagcgttttcaaatagagaaaatatacattcaatttataatggaacctacataaacctacaaaaagcgacaaaaaaatttaaaaaataagccgattgatttaaaaatcaaatcgactgtgggtaaaatgggagttgcggatattgtgcgattaacgccaaaataaagcaacacgtttgtaatggaggatcagcatgatgggtggaaatcggggaagcgtgatgacaaaagcggcccggcttgttaaaaaagacggctatatcttaatggtgatgatgttaactgtgccgctggcaggagagctgaagttttatccgctgaacgagaccttcagggtcagcttcggggttccgactttcttctttcttttgctgctgctgcggaatgtgccggctgtgctgtccggctttttaacgggggcggcagtcgtcggatttcgtgtgctgcttgatggatttgggccggggcagatcgattggctgtcatccttttactaccattatccgacttttttcttttatttcacatatgcgtttctattctacttggcaaaagtgaaacgatttcaatttcgcccgctctacatcgggtttctcggcttcggaatcgaactgattgccgatggagccgaactggccgttcaatatatgatgttcgagtctaccgtcaccccgggaaaaatccgcgacatgatggcgattgctttttcccacagctttattgtgctgagcttttttaatgtcatgaagctgtatgaaacgcaatcgcgggaaaagcagatccgcgaacaaaatgagcacatgctgatgatcgtttcaaacttatatgaagaaaccgttcatttgaaaaagacgttgaagaatactgaagagattacaaacgagtcctatcagctgtacaggctcttaaatagacagagcgataacaattcctccgtccggcagatcagccagaaagtgctgcgcctcgccggtgaaatccatgaggtcaaaaaagacaatcagcgcattttcgccggactttcaaaattaatttccaaagaaagcttcagagactacatggctgcagaggatctggtccggcttgtgaccggcataaatcgaaagtatgctgaatcgctcgaaaaagacattgactttcattattcgatagacggagaacatccgaaataccatgtgtataccgtattatccgtaattaataatattatggcgaacgcggtggaagcgattcaaaagcagggctccatcagactcagcctctataggcgcggcgatgacatgctggaatgccgcgtggaagatgacggaccgggcattcccgagaaagtcggagatgtggtgtttgagccgggatacacgtcaaaatatgatgaattcggaactccttcaaccggaatcggtctgtcttatgtgaaggaaactgtcgaggagcttggagggagcattcgattccggaatgatgcaagcggtgttgtgtttacgatcagacttccggttcaacaattgattcagaaagggtgaaggcctgtgcgtttttttattgcagatgatgaccgtgctgtgcgatcgattttaaaacaaatcattgaagacgaagatttgggtgaagtggccggagaagcggaagacggctgcgatttggaaggacacgtcctgaatttgcagcaaattgatattttatttgtcgatcttttaatgccgctccgcgacggaattgaaacggttcgtcatttgcacggcgttttctcagggaagatcatcatgatctcccaggtggaatcaaaggaaatgatcggtgaagcctattccctggggatcgaatattatatacataaaccgattaaccgcattgaaatcttgaatgtcattcaaaaagtcaaggagcgcatcgagctggaacggtcgatccatgacatacaatcttcgctgaaccggcttgtgagcctcggcggcggggggaaaaacggctttagggaaaaaagcattcaggaaacgggcgaatttctcctgtctgaactcggaatcgtcggggagagcggatcccaggatttaatcgccatccttcagtatttgtttgatgatgaacagacctcattatatgaaaaggactttccgccgctcaaacagatttttcatcagattgccgtgcaaaagctcggaccggctgcttcacccgcagagatcaacagggaggttaaagcgtctgagcagcggatacggcgggcggtcagccattcgctaaaccattttgcatcactcggtttaacagacttttcaaatccgcggtttgaaagctatgcgtcccggttttttgactttaccgtcatcagcaaaaaaatgaaagaactgcagaaagactctgccgccgtcttgccctccgcccgcgtcaacacgaaaaaattcattcaggttttctttttggaagccaagcggttgagtgaaagcgctggaaaaagaggttaaaaagagcttcctctaaagtgaggaagctcttctgcatgccggttacccagcgtattctcttttcagcagtgaaaacatgtatacgtcaatcagtcttccttttgctttctcgtattctcttaacagtccttccttttgaaaggataacgggttgagaagtttgattgaaggcgtgttttcgggctctaccttcgcttcgattcggttgaggttcaagcttgtaaagccgtagtcgatcagttttttgacagcttcggaagcaaagccttttccccaatgatttcttcctaagtcatagccgatttcagctctgccgttttcctggtcgatcatattaaagccgcatgtcccgatgacttcacccgtttcctttgcaataatcgaaaagcggtttgcctgcccttcaaggcttaaatcattgatcatttggatcatgtcccgcgcttgtgagacgtctgtaaaaggcgcgatattcatatattttgtgacttccgggtctgaccagtattgacagaggacatctgcatcctccaattccatctttctcaaagtcaatctttctgtataaagggtttccatgatcttgcctccaagttccgttttatttaggaaggtgaaagaaccattcatctatctgcgcattattcatgttcataggataaaatgcaaaactgttatcgggaagcggatggataaatcccttttttatccaagatggaaagtgcaatctcggcagcagtgcttccggcagcccgtttttcaccttgaatatgaacagcaaagaaaaaagtattttcggcagtttctacatatccgacaaaccagccggcatgaagttctccgttgataactgaagtcccggttttaccggatagaattctgccatttgattcttctaaacgtatcgaatctttcacagtttgaatattagactgtttaaaatcaaattcgttatcataaaacttttttaacatattaacctgttcaagaggggaaatttgaagagagccatccagccaataattcgccggacctgagaaatcctcatttccataatggatagatttgagatagcgacgcaaatgatcctctccaatttgccggtccagtttttgaaaataccatgttgcggagctgctcatcgcagagaataaatcctggtcttgattccattctttatacggatattgagtaccgtcccacgtcatttgagaattgttcttcgtgatgatcccggattccagtgcgagcaatgcgctgaacaccttgtatgtagaagcaggtgcgaatctggcggtgctttctttcctattgtatattgtatactttttcctgttagaatcaaacaggacaaaacctcctgagaagccatcaaaaaaggtgctgtcatcttcgtattctacatttgcaccagataaaaagtgcgtatctctttgcatagccaatatagatacagaaggagtgccggctagaatgattccaagaacaagggcgaacactaaggcgcttttcacctttagcaaaggtgatgccgccttgaagttgacaactgtgacaatccgccttttgatatgtttgtatgagctgctgaattcagaagcggctaccaaagatgacgttctttgcttaagtgaagtgaattttaaaatcacctcgccatatttgagatgcaattttttatcaagcgtttttaatacggcaaagtcgcaagaaatctccatctctgtttttgcttcctttgataaataccacacgagaggattaaaccaatagacgattttggacaggcaaagaaaatagttgatgagcatatcttttcgtttacaatggtacagttcatgaagcaaaagacatttcatctcgtcggcagaaaacattgaaatatcctttggcaagataatatatggacggacaaccccaaatgttatgggggattttatcaatggggaacagcctaaaatcactttttgatgaaagcgtatttcctctttacatgtacgaaaaagggttaatagctctttgttgttaaccatttgcaggctcttttttattttgccgatttttcgattgctataaagagtagcgataagcataacagcaatgcccaatatccagactgcgaaaaaggctgaatctatcattttgaaggacgattgttcaatcgacatcgaaaaatcctgcacccagtttgcatgttggccaattgcttccgccgtcttatctgtggaacgggtgtgagatagcgttgagctagctcctcctaaattcagaatccagtcaaaatgattgctttttagataatgaaaggggagaaaaggagcgatcaatgccaaaagagaaatcacgctaagatgatagtgggtgcctacagtgatttgagccttcagcagtttttttatgagtatgatgagagaaaaaaacagagacaatagaatttgactaaccaaaaagggaataaagaaagaactgctcatttcattccttctttatgttcttatgttcttctagtatttgatacaactcattaatttcttcacctgacagctgatcattctccaaaaagtttaataccatcgaattaagagtgccattgtaaaaccggtttaaaaaactgtgacttttcacttctatataatcattttcgtctatatttggcgtataaacgaaaacccggccttctttatggtggtttaatgctccttttttaatgaggcgcagcagcatggtttggatggttttagggctccatgtactggttttggacaactctttaatcacctcatgggtattgatcgaagaatgcttccagatgactttcatcacttctaattccgcatcagagatttgaggtatttttttcatttccatcatcctatacttacaaatgtaatactttcattataggtttgccatgttaagaagtcaatttaactggagtgacataaaatgtttttttcctttttttattccatcactcgaagatgatgcccccagccattcatttgtcaccggtttaaacgaggtcatcattctgtcggcattcatggccattcccctcatgaccttttcgttttttattccttccaaaaaaacggttgcatttaaaacttacgtatgtaatacttcaaaagactacacttgtaagatttgatgtttgagttggccgtccgtgttttcaggtgcaaggggttttcacgaatgttgccagccttagttgaaatgcctcttgattagcacagctagtcacaatcaatcaaatattcatacggagggagacgattttgatgaaattatggttcagtactttaaaactgaaaaaagttgcagctgtgttgcttttctcttgcgtcgcacttgcaggatgcggcagcaatcactcgaatgcctcacattctgccgagaaagatgaaaagacggagatgaaagatgattttgcaaaactcgaggagcaatttgatgcaaaactcgggatctttgcattagatactggtacaaaccgaacggtaacgtatcggccggatgagcgcttcgcttttgcatcgacgattaaggctttaaccgtaggcgtgcttttacaacagaaatcaatagaagatctgaaccagagaataacatatacacgtgatgatcttgtaaactacaacccgattacggaaaagcatgttgatacgggaatgacgcttaaagagcttgcggatgcttcgcttcgatatagtgacaatacggcacagaacctcattcttaaacaaattggcggacctgaaagtttgaaaaaggaactgaggaagattggtgatgaggttacaaatcctgaacgattcgaaccggagttaaatgaagtgaatccgggagaaactcaggataccagtacagcaagagcacttgcgacaagccttcaagcttttgctcttgaagataaacttccaagtgaaaaacgcgagcttttaatcgattggatgaaacgaaataccaccggggacgccttaatccgcgccggtgtgccggaaggctgggaagtggctgataaaactggagcgggatcatatggaacccggaacgacattgccatcatttggccgccaaaaggagatcctgtagttctcgcagtattatccagccgggataaaaaggatgccaagtatgatgataagcttattgcagaggcaacaaaagtggtagtgaaagccttaaacatggaaagcaaataaaaaaacattgcaatacattttgttaaaacatcgtcttacataaagtcacttggtgatcaagctcatatcattgtctggcaatggtgtgggcttttttgttttctctctttaaagataatgtgaagaaaaacgggagaatcggtctgcgggaaacgaccgggtttttgtcgaaatcataggcgattggattgatttgcgacaaaattcgacatatatactggcggagtgacttgatcgaccatgtatcgcgtttcttctcctatttgcaatactttacagaacgttaataaattctgcctataatagaacccgatcaatcatttgtatagagaggggtaatacgaatgacacatgaaggaccgctggaggaatggatgaaaaaactgagcgaggaaagcctcaaggacaatacgtttgaccgccgccgctttattcaaggggccggcaaaatagccgggctttcgctcggacttgcgatcgcgcaatcgatgggggcaatggaagtcaatgcagcaccgaggttctccgaatatccgtttacacttggcgttgcatcgggagatccgctttctgacagcgtcgtattgtggacaaggctggcgcccgatccgctaaacgggggcgggatgccaaatgaagctgtatccgtgaaatgggagctcgcagaagacgaacgcttccgccgtgtcgtcaaacggggaaccgaaaaagcaacacctcaccttgcacattcggtacatgccgaggtatccgggctgaaaccgaatcatgtatactattaccgctttaaatgcggcaaccagctgagtcctgtcggcaagacaaagacgcttccggcgcccggggcagatgttgctaaattcacattcgcttttgcttcatgccagcagtacgaacacggctattataccgcctatcagcatatggcaaaggaaaagctcgatcttgtttttcatctcggcgactatatttatgagtacggtccgaatgaatatgtttcgaaaacaggaaatgtcagaacacacagcggtcctgaaatcatgtcactgctcgattaccgaaaccgtcatgcccaataccgttcagatgcaaacctgaaagctgcgcatgccgccttcccgtgggttgtcacatgggacgaccatgaagtggagaacaactatgcgaatgtcatcccggaaaaaggccagtcagttgaagcgtttattaaacggcgcgccgccgcataccaagcttattacgagcatatgccgctccgccgccaatccttgccgaacggtcctgatatgcaattgtaccggaatttttcctacggcaatttagctgacattagcgtgctggatacccgtcagtatcgcgatgaccaggctaacggcgatggcaataagccgccttctgatgaatcgaatgatccgaagcggacgctgcttggagcggagcaggaggcttggctgtttgacaatctgagtcgctccgaggcgcactggaacattatcgcacagcagattttctttgcgcagtggaactttgggacaagcgcggcgccgatttacagcatggattcgtgggacggatatcccgctcagcgcaagcgggtgatcgacttcatcaaatctcaaaaactgaacaacatcgtcgtccttaccggtgatgtgcatgccagctgggcaaataatctgctcgttgattttgacaatccgaaatcggacatctttggcgtggagttcgtcgggacgtcgattacatcgggaggaaacggcgctgataaaagagcggatacggataagattttatcgaacaatcctcatataaagtttttcaatgattaccgcggctatgtgcgctgtacggtcaccccggaagaatggcggacagattaccgcgtcgtcccgtatgtgacagagccgggtgcggcggtttcgacaagagcttcctatgtttatcataaagactacacagggctgaaacggaccgcttccaacattgtgcctggaggcgtgaagaagtcaaacgaagtagaagaagaccgtttcctcgcacatacaagggcccatcagaagcaagtgaagcaaaaggagaaaaaagtaacccagtaatcaatgaaaggatgacagcaaatgctttcaaatatcggtattcctggtctcatcttggttctggtaattgcgctgatcattttcgggccttcaaagctcccggaaatcggccgggcttttggaaaaacgctgaccgaattcaaaagcgcgacaaagtctttagtctctgccgatgacaatgagatcggacaggggtctgatgcgaagaagcaaagcgatccatcggcacgatgatcaatagagcgggcgggtgaacccgtctgttcttttttctgtttaacatgcgaaggggaggaaggcgaaggtgaaaaaaagggaaacacatttgattgcccatcttgaagagctgcgccagcgaatcattaaaacgcttcttacgtttattctgtttctcatcaacggcttcttgtttgttcaggacatctatgactggctgatcagagaccttgatgaaaagcttgctgtactggggccgggggatattctttgggtttatatgatgattgcgggggtgctggcgatcgcagccaccataccggtggctgcttttcagacatggcggtttgtggcgcctgcgctgaccgaccacgaacggaggacggcattattttatattccggggctgttcattttttttattttggggattgtattcggttattttgtactctttccgctcgttcttcagtttttgatcggcctgtccgccggccattttcaaacgatgtttacggcggagcattattttcgctttatgatgaacctcacactgccattcgggtttttgtttgaaatgcccctcatcgtgatgtttttaacgagcctcgggattttaaatccggccaagctcagtaaaatgagaaaaatttcttattttgcgctgattgtcgtatcggttgtgatcacgccgcccgatttcatctcggatgtgctggtgatcgtcccgctccttgtattatacgaattgagcatctctttatcggcatttatctaccggaaaaaaaccgccgcacaacaaggggctgaggcccaaggctgaagacggactgtgtcttcagtctctttttttttgcctgaaatgaaaaaatcagaaaataatgatattgacaatttgtttatttgtcttacaattaaacaaaaagatgaatggagggatttactaaaacagagacatcgtatttcaacagaatgacaacgctttctcggaaaatgaacgacagggggatgacggagatgagtcaattacggaaggcgccggaaggcatattgggttttccggtggcgcccttcaacagggaaggaaaactggaggaagaagcactttacgaaaacatccgctttttattggatgaagggcttgaggcggtttttatcgcttgcggctcaggagagtttcaatctctcagcacaaaggaatatgagcaaatggtcgaaatcgccgtttcggctgcggacgggaaggtgcctgtttacacaggagtgggcggcaacttaagcaccgctttggaatgggcgcggatttccgaggaaaaaggggccgacggctatctgattctcccgccgtacttgatacacggagagcaggaaggcctctatcaatacacgaaaacaatcattgaaagcacggatttaaacgcaatcatttatcagcgagacaatgcggttttgacgcttgaacagattcagcggctgaccgatctcgagcagcttgtcggacttaaagacggcataggggatatggcgttgaatatcagtttgtcatatacgataggtgacaggctgggctggctcaacggaatgccgatggctgaagtcacgatgccggcctatgctccgattggctttacatcatattcttcggcgatatccaattatattccccatatttccagaatgttttacgaggcattattaaacggcaatgaccggcttgtcaaagagatttatgagcaagtcatcataccgatcaacgagatccgcaaacttcggaaaggctatgccgtgtccttgatcaaagccggcatggaaatcatggggcttcatgtgaaaaacacggcgagaccgccgatcgttccggtggaaaaagaacattgccggcagctcgaaaacattctgaaaaacgcgatggcgcgttatccgaaaacgaccgctgccctataaacaaaaaggaggaacttgaagatgtctgttgcagctgaaagtaaaacgtatttcaactttatcaacggccgctgggtgaaggctgaatcgggcgggatggaacagagcttgaatccggcagatacacgggatatcgtcgggcttgtgcaaaaatcttcgattgaggatgtagaccgggcagttgaagcggccaagcaggccaaaaaggcgtggagaaagctgtcgggcgcggagcgcggtcaattcctttacaaggccgctgacatcatggaacagcgcctcgatgaaattgccgaatgtgcgacgcgtgaaatgggcaaaacactgcctgaagcaaaaggcgaaacagcgcggggaatcgcgattctcagatactatgccggagaggggctgcggaaaacaggtgatgtgattccgtcgaccgattcatccgcttttatgtacacagacagggtgccgctcggcgtcgtcggcgtcatctcaccgtggaatttccctgttgccatcccgatttggaaaatggcgcctgctcttatttatggaaatacggttgtcattaagccggctacggaaaccgcagtcacctgccttaaggttatatcgtgctttgaagaagcagggattccctcaggcgtggtcaatgcggtgacaggaccgggatcatcggccggccaaaggcttgccgagcacccggatgtgaacggaattacgttcacaggatcgaatcaaacaggaaaaatcatcggccggacggcgtttgaaagaggggcgaagtaccagcttgagatgggcggcaaaaacccggtgatcgtagcggatgacgccgaccttgatattgcggttgaagcggtcatcagcggagcgttcaggtcgacaggccaaaagtgtacagcgacaagccgcgtcatcgtcttaaatggtgtttatgaccgttttaaagaaaagctgcttcaacagacaaaagagattacaatcggcgacagcttaaaagaagatgtctggatggggccgattgcgaacaaacagcagcttgacaactgcctgtcctatattgcaaaaggaaagcaagaaggcgcggacctcattttcggcggtgagaggctggcagatggaaaatacgaaaacggctattatatcaggccggccatttttgacaacgtcacttccggcatgacgattgcccaagaagaaattttcggcccggtcatcgctttaatcaaggcggatacacttgaggaagcgttggagacggcaaatgacgtcaaatttggcctgagcgcctccatttttacgcaaaacattaggcggatgctgtcattcacagatgaaatcgaagcggggctcattcgcgtcaacgccgaaagcgccggtgtcgaactgcaggcgccattcggaggcgttaaacaatcgagctcgcattcacgggaacagggggaggcagccaaagaattttttacagccgtgaaaaccgtatttgtcaaaccgtaagtcagtcgtttcggtacaaatgaataaaggagaagatgctatgaaaaaaaatcgtgcagcctcccccgataccgcggggaaaagaagttctgtccgctggtttgtcgtgtctatgctgtttctcgtcacatccattaattatgccgaccgtgcgacactttcgatcgtcggcgattctgtgcagcatgagcttgggctgagttcggtggcgatggggtatgtcttttccgcatttggctgggcgtatgttgtcggccaaatccccggaggctggctgctcgaccgttttgggtcgaaaatcgtcatcgccgccagcatcttcttttggtcattgtttacccttttgcagggtgcgcttggctttttcgccgcgggaacggccgtaatccttttatttgcgctcagatttctcgtcggtctgtcagaagccccgtccttccccggcaacggccgggtggtggcttcctggtttccaagttctgaacgcggaacagcttcggcgatcttcaactcggcgcagtacttcgcactcgtcattttttcaccgctgatggggtggctcgcccactctttcagctggcatacggtttttgtcattatgggtgcactggggatcgcgatgtcgttcatttggctgaaaacgatttacgaaccgaaaaaacacccgagaataaacgccgccgaactggcgtacatcgaagaaggcggcgcgcttgtctcgatggatgagggaaagaacgcggaaaaaaaagaaaaggagtcgcaatggccttatattaagcagcttttaagaagccggatgctgctcggggtgtatatcgcccaatactgcatcacaacgctgacctatttctttctgacatggtttccggtctatcttgttcaggcgcgcggcatgtcgatccttgaagcgggttttgtcgcatcgcttcctgcaatctgcggatttttaggaggattgctgggcgggttcgtgtcagacttccttttgaaaaagggctgctccataacggttgccagaaaaacgccgatcatcctcggcatgctgatgtcctgctcaatgatcatatgcaactatgcagattcgtcctggctggtcgtttccatcatgtcgcttgcctttttcggaaaaggattcggcgcgctgggctgggcggttgtgtcagatacctcgccaaaggagtgtgccggcttgagcggcggcatcttcaacacctttggaaacattgcgtccatcacgacgcccatcatcatcggatatatcgtgaatgcgacaggctcatttaacggagcgcttgtgtttgtcggagccaacgcgattgccgcggtattaagctatttgtttctcgtcgggccgatcaagcgcatcgaactgcagaaagagaaagaccctgcggacaccactttatccatgtgaaatgtaagcgctttaataagagggaggctaaatcgatatgaatacaaacatccatcagcatgtaaaagaggagaaagcatcgcaaacaccgtctattgccgacatgcgggttatacccgtggcagggcgggacagcatgcttttgaatttgagcggagctcacggcccctttttcacacggaatatcgtgattttaaaggattcatcaggcgctctcggcgtcggcgaagtgccgggcggcgagcggatccgccagacgctggagcaggcgaagccgctcgtcatcgatcagccgctcggcgctgttcaatcgattttgcagtccgtcaggcgccggtttaaagacagggatgccggaggacgcggggtgcagacctttgaccagcggacgacgatacacgctgtgaccgcattggaagcagctttgctcgatttgctcggaaaatttctcggcgtccctgtggcggcgctcttgggggaaggccagcagcgggataaagtgaagatgctcggctatttgttttacatcggggaccgaaagcgcacgacgcttccctatatcagtgaacaagaggcaaatgacgactggttccatctccgccgtgaagaagcgttgactcccgaggcgatcgtccgtcttgcggaggcagcccgagaacgatacggatttcacgattttaaattaaaaggcggcgtcctttccggagaagaagaaatcgaggcggcatccgctttagcgaagcggtttcctaaggcgagaatcacccttgacccgaatggggcgtggtcattggaggaagcgattgcgctttgtaagggaaagcgggatgtacttgcctacgcggaagacccttgcggagcggaagccggatactcaggccgggaaatcatggccgaattccgccgtgcgacaggcattccgacagcgacgaatatgattgcgacagactggcggcaaatggggcatgcgatacagctgcacgccgttgatataccgctggcagatccgcatttttggacgatgcagggatccgtccgcgttgctcaaatgtgccatgaatgggggctgatatggggctctcactccaataaccattttgacgtctcactggccatgttcacccacgttgccgcagcagctccgggcgatatcacggcgattgatacgcattggatatggcaggatggacagcgtctcacaaaacagcctttttcaattgctgacggatatgtccaagttcctgatcagcctgggctcggcattgaaatcgacatggaacgggtggaaaaagcaaatgaactatatgagaaaatgacagcaggcgagcgcaatgatgccgctgccatgcagtttttgattgaaaattggcgtttcgaccctaaacgtccttgtcttgttcgataattgcggaaacagcggtttgagaggcccctagccgacattgtcatacgcgatattttgtcttacaatatgaacaactgaaagggggcccacagtcgtggaagaagatatggaaacattgcaggtcgaatcagtcaatcgcaagactttggcaaaacaggttgttgaacgaatcgtccatttattatcaagcggccagttgaaaccgggggacaaactgccgacggagattgagctcatggaaaagctgaatgtcagcagacccgttctccgcgaagctttaatatcgctcgaaacgctcggaattatcaaaagaaaaacccgggacggcacatattttaatgataaaatcggcattcagccgttttctgtcatgctggctttggcagtcgataatttgccggccattattgaagcgaggatggcgctggagctcgggcttgtcacgatcgccgcagaaaagatcaatgacagtcagctcgaaaggcttcaggaaacgatcgatattatagcaaacagcacggataatcattatggagaagcggataaggaatttcaccggattatcgctttgagcgcgaacaacccggtgcttgaagggatgattcaatcgctcttgatcacacacgccaaaatcgacagccagattccatatagggaaagggaccggactgtcgaatatcatacgaatattttgaaagcccttcaacaaagggacccatatcaagcctatcaccatatgtatgagcatttaaaatttgtacgtgacaaaatactgaatggtcttcgtgatgaaaaaaacaatcattaagttgtttgacagcgctttctaacatgtgccgcggcgggagaagggccgcggaaaggcgctgatcgaaaaggggagttgatcaatccttatgcttgtcaatcaaactgaaaccccgttgtacattaaggtgaacgaaaaagacaatgccgcaatcatcgccaatgccggcggactgccgcaagggacggtgtttccttgcgggcttaagctgcaagagcggattcctcaagggcataaagtggctttaacagacatcacacagggcggtgccgttattcgctacggcgaaattatcggctatgccgtcaaaccgatcgaaaaaggcgggtggatttccgagtcgcatatcatgcttccggaagctccgccgctcgatgaactgcccatcgccaacaaagttccaaaacccgctccccttcttgaggggtatacatttgaaggataccggaatgaagacgggagcgtcggcacgagaaacgtgcttggcattatgacaagcgttcaatgcgtcgcaggcgttctcgattacgcagtgaaacgaattaaagaggaactgctcccaaaatatccgaacgttgacggtgtcgctgcattaaatcatcagtacggctgcggcgtggcgattaatgcgccggaagccaaaatcccgatccgaacgattcaaaatatcgccaggcaccctaatttcggcggtgaagcgatggtgatcggactcggctgcgagaagctccttccgacgaagatagagccggaaggagacgctgaaaacattctttcactgcaggaacggcaagggtttcagcaaatgatacaatcgattatggaaatggccgaagagcgcttaaaaaggctgaatgaacggaagcggatgacatgtcccgcttcagacctggtgatcggcctacagtgcggaggcagcgacgccttttcaggagtgaccgcaaaccctgcgtccggatatgcggccgacttacttgtccgggcaggggccacggttttattttcggaagtcaccgaagtccgcgatgccgttcatctcctaacaccgcgcgctgtcaatgaagaagtcggccgcgccctgattcgggaaatggcttggtatgaccgctatctggaaagaggcgaatcagaccgaagcgccaatccgtcgccgggaaacaaaaaaggcggactggcaaacgtggtcgagaaatcgctcgggtcgatcgcgaagtcgggaagcagcccgatcagtgccgtacttgcgcccggtgaaagggctgtacagaaaggactcatttttgcggcgacacctgcaagcgattttgtatgcggcaccctgcaattggcttctggcatgcatttgcaggtatttacaaccggaaggggaacgccgtacggccttgaaatggctccggttttgaaagtggcgacccggcagtcattatcagaagattggcacgacttgatcgacgtcaatgccggaaggatcgctacaggcgaagcttcaatagaggaagtcggctgggaaatcttccggacgatacttgacgtcgcaagcggaaggaaaacatgggcggaacattggggactctccaatgacttgtgtttattcaacccagcgcctgtgacttgatccgtgctagtgggaaagtagattggtatcggccaaaagatccggagatacaataggtttcaactagaaatatgaataatttttgtaaaaaacacacgtttttcaattacaatgagtgtaattgcacgtgtgtttttatgttgaaaaggatgggtgaacaagatgcagcacatattgcttattgaagatgatcattcgatcagtgaaatggtcgatcattatttaacaaaagaaggatttgaggtcgtgcttggcttttgacggagaagagggcgttcgcttgtttcagcaaggcaattatgatgcgattctgctcgacatcatgcttcctaagctgaatggaatggattttctgaaaatgatccgtgaacagagcaaagttccggttttaatgatttccgcaaaagacggggatgtcgataaagcgctggggctgggctttggtgcggatgattatattgccaagccgttttcgatgatcgaactgaccgcaagaataaaagccgccattcggcgggcaacgcaatattccgtcagtgaaccggcaaatcaaaaaatattacgtgttcacgagcttacggttgatatagaaaatgtatccgtacaaaaaaatggtgaaccgcttcagctgacatcgacggaatggaaaatgctgactttgtttgtgacaaaccctaaaaaagtgtttacaaaagaacaaatctatcgttcggtttggaatgatgattattttggcgatcaaaatattattaacgttcatatgaggcgcttgagagaaaagatagaggatgatccttcctccccgcaatatattaaaacgctttggggcatcggctataaattaggagagttttaggatgacaatgttatggattggcattctgataattttggcgtctctcaatatcgttcaatataaaatgaaaagacaacgggatcgaaacttgaagtacatcacggaaaagctcagtgtgatgctaaatgagcatgaggctgatcaaattttattaggaacggctgataaagtactgcgggctctgctcgtgcaaattaacctgtttgttgaggagcatcagcacataacagcccgttttgcaaaaacggagcagtcaatgaaacgaatgctgaccaatatgtcccatgatctgaaaactccgctgaccgtcgtgctcgggtatatcgaggcgatccaaaatgattcagacatggcggaagaggagcgtgaaagactgctggagaagctttatcaaaaaacaggcgaaatcattcagctgatgaattctttctttgacttggccaagctggaatcggaagataagcaaatactgctcactaaaatacatatcaacgaaatatgcagaaaaaacattctccaacactatgatgccgttcaggcaaaaggttttaaagctgtcatcgacatcccggataccccggtttatgcacatggaaatgaagaagcgcttgaccggattttgcaaaaccttttatcaaatgcgattcaatatggtgcagacggaaagctgatcggattgtcccttacatatgatgagacgtggattgtcattacggtatgggaccgtgggaaaggaattagtgagtacgatcagcagcgggtgtttgaaagactgtatacccttgaggaatcgagaaataaagcgttccagggaagcgggctcggtttaacaattacaaaaaggctcattgagaaaatgggagggaacatctctctccaaagcaagccgcatgaacggacagtgttttccattacgttaaaacgaatgacctattagcaaacgtaagaatttcttaagaaacaagaaataaaaaagacagcgtccatcgctacaatagacacatagcagagacaggaaaggagaaacagagttgacttacatcgtacaaacaagcgggcttaccaagacattcaaaggtcaagaagttgtttcaaatgtaagcatgcatatacgaaagggagaaatatacggttttctcggcccgaacggagccggaaaaacgaccatcatgaagatgctgacgagcctcgtgaaaccgacaagcggcgaaatcaatatccttgggcataagctgacaaatcgatcatacgagattctcgggaaaataggcagcatgatcgaatacccgattttttatgaaaatctgacagccaaagaaaatttaaatctgcattgtgagtatatgggatatcacaataaagccaagattcaggaagtgctggacatggtgaatttaaaaaatatcgacagcaaacctgtcaaaacattttccctcggtatgaagcagcgtcttggaatcgcgcgggccattctcaccaaaccctacttgctcatcttggatgagccgattaatggccttgatcccatcggaattaaagaaatcagaaacttatttcaagtattgagcaaagagtatggcatgacattgctcatctcaagccacatcttgaacgaagtagagcaaattgcagatacaatcggagtgattcgggacggcaggcttgttgaagaagtatcgatggaaagcgtaaggggacggaacacagagtacattgaactcgtgacgccgaaccaattgcatgcttgctttgtgcttgaacatgagctgcagattgctaattttaaaatactaaatgataaaacgatccgaatttatgatgccgaagcttctcaaacagccatttctaaagctctgattttgaatgatgtagaaattgaatccatgaataaaaagcatacttcgcttgaggactacttcctcagcttaatcaacggcaatgcggtcaacgcataaggaggcggagaaatttgctgaatttgatgagaattgaaatgaaaaagctgaagctgggatggtatatacgcggagccgtctttgccaatttcatcatttttggttttctgtggatggtgacctgcacagaaggcaaggagacgttccaaacgattgatgaaacttttctattgatcggcacttttgttagagccgtttttatcgtattcggcgctgtgctgatctcaaaattagtgatttcagagtttaaaaacaagacaatactggtgatgttcacgtatccgatcaatcgaaagaaactgctggctgctaaactgctgatcgcaggcgggctgaccttcgttacgatattgatatcaaacgcatgcgttgcagttggtttttttctgctgaactcaatctatgggatcatccccggcgaattaacagcttctatcgcgtctcagcaggctctgaaaatgatcgtttttgcttttggcgccgcaggaacgagtttagtacccatcttttttggaatgagaaagtactccactgcggcaacgatcatctcatctgttgtaatcatcatgccgatcagttccacaggccctggcttttctatttcttcaattgtgtatatacctttatctcttgccgcagtcggtctgtttttttcctttttggctgtaaggcgtattgaaaaaatagatgttttttaacggagttgaagttcaatgctgaatttaattaaattggagtttaaaaaaacaaaattagggtggtattacaaaggtgcagtaattgcaaatctatgtattctcggtttattgtgcctgatcggatcagaggaaaaaacctccctcaagcaaaaatgtcgatggctgatgccgcatccatgctgctatttataggaattttcgtgaggtctgtgtttattgtctttgccggcgtgctgattgccaaactggtcatcggagagtataaaaacagaaccatcacggtcatgtttacatatccagtcagcagaaaaaaactaatggcagcaaaactgctgcttactggcggattgacctttttgacaatgatcgtgtccgaactgattcttgcatttattttctcgcagctcaatgatgtctatcaattcagcccggaaaaattgacgatgcatgacgtagggaatgagattggcagtatgctcatttatgctgcttcctctacaggactgagttttattccattatactttgggatgcgcaaacaatcagttcctgccaccattgtgacatcctgtatcttgaccacgttgatcggtcagcaaagcgatgaattttcacttgcttccatcatttacattccgatttcattggctctagtcggaattgccaatttggtcgatacgaaaaattgaccaggaagacgtattataagatctccgtatatcttgaaggtgcaaattgacggaataccggcatttacctatacttgaagaactgaaacaacaaggaaaacgggtgaacatgtcatggaatttgaaattcgctacatctccttttacgtcatccaggtcgacggcaaggatgagcaggccaacaagcaatataaacattttcagacgctggatacagaggaatttgaaaacagcgagctgaaggatttcttagacggggaattgaaaaaaatcgtcaagcggaaagccgaacgccatccgaaatcggagcaggtgccgacgaaaatcggccgcttcatcacagagccggggcatgagcttgattctaatccgaactacaatctgtttcacaaaacaaaactggcggagacaaaggaagaattcaatgaactgagcgaacagttcgtccgcacatacctcgacacgagcgccgtcaggggaggcgtgtttttagtggcgacagccgtaccgcgcaaatacttcgatgatacatttgtctttgtcatgaagtgcgactttgaaccgaaggtcgctacgatcgccgatgaatcgtcgctgattcgcaaggtcgaaatggcgattacgacgaaaaacatgaaatcgattcagtacccgcacatgcctgaagagggcatgacagaggaaagcgaagtgaaaatccaccaggcctcgcacgcccgctactttgaagacttcttaaaattcgtcgagtacggcgagtcgatgccggaaatcatgaagtcacaagtgatgaacatggtgcaggagcacgtgtacgaagcatttgaagacaaaagcgaagaactccagcagtttgaacacgacctcgaaatctgggaagcgagcgaaaagcgggagattcaggaacgtcttgatacccaccaagtcatcgaagcctcagctcaaatcgttgagcacatgcctgaggcagagctgaaaatgaagctgggagaaaccgagattaaaggattgctggccgagttcggagactcgatccacctcgccaaagtaaacggccgctatgtggcgctcattgaagccgaaacgatttcgtttgaaaaggggagctctccggtcgagttttataaacctgagggtctgcatgaggtgattgagcggatacggaataaaattgacagggaagatgagaaataagaaaaggcatccgttttttggatgccttttgatttttcatccagatagatgagactgctaaataggttttcatgtaaattactgtttaataaggttaatataaacataatcaagccgatatagggagtatagaaagaattgaggggaggtgcccaatgcgtctcaatagtcaatacatccgtacacagctgatggtccagaatatattgaaaagaaatgcggctgatacaactttaaaaaatgtctcttccgatatcactgccgttgcgaagaaggccagcagtcaagcaggaagagcatcgaaagaaagtttgagtaagctgaactactcaaaggacagtattgtgaatcatgccggagctttcaggcgggcatacgaagcagcaaatgatcgaactgtcacagatacagggaaagaaacgaagattaatgcccaaaacccctatgtgtcagaaagtgacatcaggaaaaaaatcttagatgaaaaatacagcaaaataaatgcaatgaacaaaacgaaacccgaccctttaggctacattaaggataaatacaaaaaccccaattccccttatttcagaaatgacttgtcggcagcagaaagacaggctgcatatgacaatgaaactgagtggctgttcaaaggaaaggcgcaaagctataatatgcaggatgccgcctttcgaaatgtgacttttaatggggaagtagagacggagaatgagaaagtatatcagcgcagccaagtcaacaaacagcttcaagcgctgctggatcaatatcatattgccattccagcggatgcggcgctcacctttacgattacaccgattgattatcaagtaaaggtaagcggaacagatgatgagcaactcatccatcaaattgaacaaatattgcaatcaggagaaaacagcaaacagttatttctgcatatcatgaaaagcttgagcagcgattcggcacaatattccaaagaagcgcaccaaaaatatcagacggttcgcgagatatatgaggtgacagggtatcacctgaaagatttggaagtggttgatggccgatatgtaacaccttccggccgtgatttattagaagtgtataaagaagagctggagaaggatcccgtcctcaagaaaacggctcatctcgcaatcgctcattatggagcagagctggacaggcttgcggaagccgaatatgattctgttccggatttcatcttgtctattgactacagcaacgggtcattgcgggatacagggcaaaagaagagctatggaaccggggatacggcttggctaagagaattaaagcgccgaacgggtgtgaatgattagttttaaaagccaggaacgagtttcctttatcagggtgattttcttaataattgaatttttcgttgcgggtcttcccaacacctgttaaaataaggctaacttttaagaacggagggatttcccaaatggcatacatcagattccgattgaactttgtcctcgctaactaaatcgtgaacaaagactctgcctgtgtgcagggtaatcgggattagtctgcctgtttttagggagcccttatgcagtaatagagggagaggcgcggattccagcgcctctttttgcctttaaaaatagcatttctgaagcttgccttcagtttattagccatatcttttttccgtttactttccagcacaggcagacgacctgcgctttttttattcaaaaccttcagcaaaggggaaaatcgtatatgacaactgtaaatgagcaaattgaacatacattaaaacttgcggaaaaacacggccttcggctgaaacgaaagcatgcggaaatcaacgagtccggcatggattttcaagtcgtttttgcagaagatgaagcaggtaagagttgggtgttgagaaaaccgcggcgcgacgatgtgattgaaagggcagtgtatgaagggaaagtgctgaagctgctgcaaaaccgtcttcccgcggctgtgccggattggcgcattcatactcccgaactgattgcatatccggagcttccgggtgtgcctgccgcagtcattgacatggacatcaagaattacgtatggaacatggagcatgagcctccggctgaagcgtttaccaggtcattggcgaaaacgctcgcgctattgcacggcatcgatcataaggacgcagaagaagcgggcatgcatgtgatgaatccggatgacgtcaggcagacaaaagcagagcatatggagcggatcaaaagtgagctcggggttagcgccgagctctgggaaagatggcaaaagtggctgtctgacgactcgtattggcctgaacatacggtgtttatccacggcgacttgcaccctccgcatattttgattgaccagcatcagagcataactgggctgttggattggacagaagcaaaaatcgccgacccggctaaagactttctgttataccagacgattttaggagaagccgaaaccgcacggctcatctcttattacgaagaagaaggaggacgcgtctggccgcggatgaaagagcatattaaagaaatgcaggccgcctacggcatcgaaatcggcatgtttgcccttcaaacgaaacaagaagagcacttgaaaatggcgctggacgcgcttggcgtcacacaataaaaaaaggctgtcgatttcgatcgacggcccgttttacatcatcactttttcaatcacagcaaaaaaagcctttttttcttcctctgacaatttgccgaagagcttgtcgatcaaggcctggcggttttccaccatttgtgcggcgatcctcgttccttcttgcgacagttcgatccagacggtgcgccggtcatcgttatttctcgatctgatcacaagaccctctttctccaaatggttcagagctgttgtcgttgctgatggagacagcgcgacctcctgtaaaatttcctttatcgtacatgttccgtgtctgtaaatgatacgcaaaataaaccctttgccgctcgtgatacttttcggaatcgtttcttcgtctaatttctttgaagaccgcaaatatttcgtgaaagcatggtccaatagattcgcttcaatccgatggtgattcatgaaggtttcctcatttccgacatcgtgtagtagatcagcaatttcatactgaccaaacaaacataggtctattttatcataagcgaatgctccgcaaaaaacgattttgtgaattttaaaatgagcggtttaattccttttgttatcagttcataaagataataattctattatgaaatagttttacaatggatatattttgttttagaatgaatttgtgcgtcacataatctcaccaggttttgtgagaaacaatgaaaatttggagatgaaaattttgagtacacttcagcaattaatcaatcatcatatggaaacgtcagatgggttggaagcattgtccggaggagatcgaacgtttacgttcaaagcgtatcaccaacgggtgaaccagctggctcattatctgctggaggagggtgttcaaaaaggagaccacatcgcggttttatgtaaaaataatcatcattttcccgtcattttgctggcgtctcttaaaatcggagcgacagtcgtgccgttaagctggcagctgacatcgtatgaattaaaaggaatcttgaacaactgccggccgaaggtgatgttttatgacttggaatttgccgatatactaacgccgctccgcgaacagcttcagttctgcctgatgattgaagcgggtgcgggaatgaacacgactgaacagtttgagagcttatttaaaaacaggccgctgaaggtggaagctgagcaggtgacagagcatgatttggctttaatgctgttcacctcgggcacgacgggaaacccgaaaggctgcatggtcaaccacggcagtctggccgcatacttgacagaggtgaacgtgaaatcgaagcagctgaaaggcacgcgctttttagcgagccacccgctctatcatatgagctcgctcaaccatgtttttcaggcggcttttgaaggaattgccctttatttcttatgggatcccgaaccgtttgaaatcctgcaggagatcgagaagaaacgcattcatatgatgatggcgtttccttccgtctacacctacatgctggaggaaatgaaaagacatccattcgacctgtcatctgtgaaaatgcttgtttccggcggcaccaaggtgccggcgcggctgattaaggagtacaatgaccatggaatcatgatggtgcaggggtacggcagcacagaagcatggacggtcagcgtatggcggcctgacatgggctgggataaagtcacttcagccggcaagccgattccgcaagtcagcataaaaatcgaagaccctgatacacatgaagagctgccgacgggagaagtcggagaagtcgtcgtcaaaagcccgtatgtttttgaagggtattaccaaaatccttccgccacgcaaaaggtgctgaaagacggctggttctatatgggggactccggcaaactcgatgaagacggatttttatatattaccggccggtataaagacgtcattgtctacggaggcgacaacatttatccggaccaagtggaagaaatcatcgatcaagtgcccggagtagttgaatctgccgtcatcggcgtcccggatgaaatgtacggcgaggttccgagggcgtatgtggtgaaaaatgaaagcgccggcctcaagaaggaggacattatcgcgtattgcaaagagcgcctgtccgactataaaattcctgaaatcgtctttatcgacagccttccgaaaaacaggctcggcaaaatcgtcaaaaaagatctgcgtgaactggcagtcaaagggcagtgagcgcaatgattgaccgaaagcttatccagcattggataagctttttttgctgattccttgcatcagctgccgttttttgtaacgttttccagtgctaaacccactacaacattaggaggtgttgacaattgaaatcgaaatggagtgcaatggtggttattgccggtcttttattgctggccggatgcggtgcactgaaggaggctgatcccccgcgcggcagatcagcgcaaaaaacggaagcctcgttttctgaagctgaacagcgatttgcgctcgccttgtttcaagacatgataaaagaagaagggagccggaaaaacatcttcctctcgccttacagtattcagcaggcacttttgatgacggcaaacggtgccgcgggagacagcagaaaggaactgctcagcactttacatctcagccaggcggatatggcatcgatcaacgggatatcaaaatctgttaatcgttctcttgaaacgctgcctcacggtgaattttcatcagctaattcgatatggaccaaaagggagctgaaagaaagctttcaagacgcgatcaaaggccttggcgacgcctatcagcttcaaattgatcctaatcgggcaacagaggaaatcaacagctgggtcaaaaagaaaacgaaagaccgcatcgatcagatcgttgataaagtctcgtcgaatacgattgcctacatcatcaatgccgtctattttaaagaaagctggaagcacccatttgatcctcacatgacagcggaacagccattttattcagcggacggctccgcaaaaaaacaccccatgatgacgcagacaaaccgctttccttatctggaaaacgaacattttcaagccgtcaagctgccatttcaagacgaaggcctgtcactagccgtttttctgccgaaaaaagcggcaaatctagaacagcttctgactggcatgacgcatgatcaatggcgcgccttgcaaaagggctggacgatgaaacaggtggagctcaagctgccgcgcttctcatttcaaacagactacatgttaaatgaaccgcttaaacgctttggaatgaaaaccgtgtttagcagcgcgaatttttcaaatatgtttaccgggcatggcgccgctcaaattaataaagtcagacataaaacatttatcaaagtggatgaagcgggcactgaagcatccgcggcaacggcggttgaaatcatcgaatcagcccccgtccctgaagtgaccatgactgcagaccacccgttttattttgcgatcgttgatgaagcatccggaatgattctctttttgggcagtgtggcagagccgaaagatgattaaatctggggaaataccattattttataaaaattcattaaacttcctgttttattaccgatattaggaagggagttcctttatggtgatgaataaacaggaggcaaggacaaatgaaaaaaagtttgtttctgttcgtgttcagtttgtttttgatggcgattccagcattttcggcttcggcgaatgtttacgaagatgagtatgaacccaacaattctttcgctgaggcttacgatgtagggttgtggaaatacaagacgatttcggcgacgattcacagcgaaagcgataaagattattacaaattttacgcgacaaagggagaacagcttgccattcacctaaagaacatcccggcaaatacagattatgatctatatttatttaaagatgcttacggctatcccgcagtaggatcttctgaaagaatgggaaaccaaaatgaaatcatccgcttggatgttcccgagacaggccgatacattgcggtcgtcatgtctaaagacggttcatatgacggctggggattttacagacttgaatttatcgacagaatgaagagcggtgcttatacggcgaatttgtctccgtcatccatctcaagcccgggacagggagtcgtttctccggttgccgccgtcaatcttgccaatgcctcggccattcccgaaggagcgactgtgaaaagcgtttctgccgagggaacgatatatccaagtctcggacacacctacagagaagtcctgaacaaggaagaaggcgtttggcacacatcggtttcaggcggcacactgtttccggatctaaagcctgaacttgcgcttcccgtcaaaacgacatggaatgtgagatactattcgctcgcttggagcagttcaacttggagatcgccgcagctgaagatcaattatcaatacgattcaacatacggctggtaaacagatacaaatcccggccgatataaaaagtaatagaatgtaattggcatgaaaggagctcccatgaatattagagacagggtaaaactttcgctttattccgagcagctgatgaagccggccgccgcgaatgtgccggcaaagactaaaggctccaaaaggatgcccgccagccaaacagacactctctccatcagcaaacaggctgaatcagcccaaaaaaatgcaccgtcattacggtcacaaatgaacggcgttcaatttgagatctataatctttatgtggacaggcagcgtttgaacagccatatcgaacgggcgctgcgggagagcggaatttccctttccgaaagcgaacatctgacattgcatgttgacggacataaccggattacagttgaaggcatcgaagacgaacaaaaaagaacccgtatcgaagctgttttaaacgacagcgataaacggttcggtgcgcgtctgttgggccacgcagaactgatcggtgaacaaaacggaacgccgctggataaacaggcttacgaaaaatggcatgtgaatgagtttttgaaaacggtcgccgggctgtctttggctgatgtcagtttggatgaaagaggagagcttgaaggcggaaatgagaagctcaccagagtgattgaatcagccaaagacccgaaaagcgacttggagaagagttttcaaaacattctgaagaagctgaagaatgtcctggcgaaagggccggacaccattccggacaggtcggcttctttcggctatgccggcggaacgcttatcgatctcaatgtatcaaaaggattctccgcgggccagctgaacgagtggctggatgatccgtttcttagagaagtcctgctgaacaatttttaaaagacctggcaaagtgattttgccgggtttttttgtttgcataaaaattgcacgaaaaaaatttcaaatttcgcattgaccctcacgttgcgggatactttatagtcaatatcgaagggaggtcagatggatgaaaatgaaagtaaaggaagtggccgatttagtcggcatcagtgtgcgcacactgcatcattatgatgaaatcgggttattagctccgtcggagacaaccgaagccggatatcggctgtattcagatgacgatctggaaaagctgcagcaaatcttatttttcagagagcttgacttccctttaaaaaagattaaaagcattcttgagaacccttcatttgacaagaatgaggcgcttcagctccaccgcaaagcgctgctggagaaaaggagccggcttgaccaaatgattgcgacaatcgataaaacgatccaatttgcgaaaggagaaatcaacatgacaaacgaggaaaaattcgcgggttttgatttcagtcaaaacccgtatgaggaagaagcgcgggaacgctggggagatgaagccgtcgacagatcgaaggcctatatcgaatcgatgtccgaaggtgaacgaaaaaaaatggaacagcaatatgacgccatttacagaaaaatcgccgctctcagagaaggcgcccccgactcagaggaagcacaggcggctataaaggaatggtacgactttctgaacaataacaccggccacagctattcgctggaagctttcaaaggtctaggacaaatgtatgtggctgacaagcgctttacgaaaaacatcgatcaatacggcgccggcttggcgaagttcatgtgcgacgccatgacggtgtttgctgacagaaatcaggaataatcgctggaaaccgcctgataaggttgtgaaatgaccttttaggcggtttttttagattttaatgtgagatattccttttgggcaatagcctgtgctgacttatttgatttgcaggctgattgctgtgtttgatttgtgtcgaatcgtctaatatgctattatatcgttagtcgatatatcgtaagacgatacaaaatgaggaggcaaatgatttgaatacataccttaccgggattttatttgttttgagcggaattcttttattaaatctagcggttttatcagggataaacggtgtattgtgggggctggttcttgggggcagcatcattttcaatctaataggtgttgtactgctcatgagatatataaatgaaaaacgccatacttaataatgaggtgcgaaaagtgatgaaaaaaacggcggaaaactatctaccgcttacgcaggctacatattacatattattgtcattaactcaaccattacacggctacggcattatgcaaagggttgagagcatgagcgagggagaggtcaaactagggcctggcactctttatggtgcattaagcaaactcgaaaagcaggggttgattaaaaaggaaggcgaaaccggcgataatcggagaaagcagtatattttaacgaatgaaggatgggcggttgttgaactcgaatttaaacgtctgtctaaattggtggcgatcagtcaatctatttttcaaaaagagtgagatacaagcaatgagtaaaaaaagaaagcgtaaattccgtttttttcttgcctggcaagaccggaaggaagaggactggctgaatgaaatggccaaacaagggtggatgttaaagtcattctttttatttatctatacatttgaaaagacaaaaccaagcaatacagtatatcggctcgactataagacaacatcaaaccttgatcaagaagaatatattcatatttacgaagatgcaggctggaagcatgtgacacagtttttaaattggcattactttgcggctgatccgagtcaagttcaaacaaatgtgatttatacagaccgtgaatctgaagcggaaaaatataatggcttattaaaagtgttatatgctgcacttgccagtgtatttctcagctcgggacttccgattcttatcataggcatcccgggatatttttattggatagcagcattcaatctctttgttttgtgcctgttgatcgtgtgtatattaaaggttcgtaaaaaaacaagaatttgacgctgtttgacacccgctaattttcagagtaatatattttttacaaatcatgtacggctaaacgatattgaagaagagcaagtacgtgtcagagcatgggcttaagagagtcggtggctggtgtgaaccgatgccctcctgatgccgaatgggcttctgaatcgcttcgctgaaacgggcagtaggcggagccgggatgttctctccgttatcaagagaagcgtatcgaaagggctgactgtcccctttccgtatgttccgagcgaatcgtttatgcgattaataaaggtggtaccgcgagaccctcgtccttttgtgacgggggttttttgcatttttaaggaggtggtggccatggaggaaggctggccggagtggccgcataatactaaacggaaacggaggtgtgatcgtaaatggtgattgcaacggacgatttggaaacgacatgtccaaattgcaatggaagcggaagagaagagccggagccttgtccaaaatgttcgggaaaaggcgtgattttgacggcgcagggcagcacattgctccattttataaaaaaacatctcaacgaataaaaaggacgggtgtttagagttgagtcgagcagagaagagtacagctgagcagagcggccatattcaacacggtgttcgaaaagcggccggggtcgtttttatggtctttgggacgatgtgttttgcttcaaaatccatttttgtcaaatgggcttatgaacaaggtgcaaagccggaagcggtgctgttgtaccggcaattatttgcggcgccgctgttttggctgatttttattgtgtatcgctcaaagcttccggctaagcctgaaaaagcggagatttttaaagcttgtgcggccggattgctttgtttttttctatcgccattgcttgattttatcggccttcacggtgtttctgcaaccgttgaacggatgattgtgatgagctaccccatgttcgtattgatcataaccgcctttgtaaataaaaaaatggtctcgggtaaaacgtttgctgccatcttgcttgtgaatgccgggctgttcttggctgtcggcggatgggatgtgcaagcattggaagcgaacctgtcaggggcttttttgatcctattgtccgctgtcgcttatgcggcctatcttgttgtggcgggaggacttgtccgtcaaatcggagggattcgaatgaatgcctatggaatgtcggcagcaagtcttgcgatggccggttatgcgctgcttcgctcgctgagagaacaaccgggaatcgtgctttcttatcctcccgcaatgtatggtttttttatgatcattgcggcggtgacgacggtcattccttttttattcatgctggaaggcatgaagcggataggagcggaacgagtggccgtcatttccatgatcggccccgtcctcaccatcttcggaggtgttttgtttttaaacgaacgtttaactcccgttcagtggctggggtgcttgctagtgcacctgacggttagtctgctggaataccggaaatagagaaagggattcatatcccttttttatttctgtttaaatgaataaaggtggtttactcagtgtcggacgttttcatgacatatgttctagccgcgaaatcgtggaccgcttgtttcgttcctgaaaaaacgacggttaaatacagcagaccgaaaaagatatgcacccatgagacgatgtagcgcacgaaagcctgccaaagcttaatccgtcggcccgtatcatcagaaacgatacgaattctaaaaattgcttttccaatcgtgccctggagctttgtcagcggcatcagaagcggatacaaaacgtataccagcagggcggctgcagcaacttcatgagatccgtcgccgaatatccatgcggatgaaaagtgtaacccgaccgccaatacgcaatcgatcaaccatgcacccgctctaacccaaaaacgagcgtattgcaatatgtataacatcctctctattataaatgaatgataaaaacacaacattaaccattttatagtctttttttctatttttaaataaaccttttggcctcttttataaaattttacttttcagctaaatcatactgattttcattatcggatttccccctcctgaaagttttgataaaataaataagttgtagtataagatacggaggtttaaacgtgggaaaagtaaaaagaaatatgccttgcccctgcggcagcgggctgaaatataaaaaatgctgcggcaaagcagagggagcgtttccggctgtcgcggtgcaagaattgaaacaaatccagaaagacgtcatggaattcgcttttacggaacataaagacacaatcgatcaatttctcaatcagtattcttttctgtcagacctggatcagtctgcgcaaaagatatgtgtttttaacctgggcgtgtggggagtatttgcccgcccgctggcagatggaggattgacgatttttgaagactttttacagaaaaaaggatcttcgattctcagatcgcagacaaaggaagccgttcaatcgtggaaagacctctcccctgcgttgctgcgtgtgaaacatataacagatggcggcattcgctttgaggatgctgtaacgaatgaagagctgaccgtgaggatgaatgtgaaacgggaagggccttttgtaggcgagtacgtgctcggctttccgatcaagatcggaagccataccgagttcttcttgcaattcaccatctatcctgcaaaaatggcggatgctctcaaagacaggctaagcgaggctttgaaccgttttacagaagaaggcgggacgaaagagcagctgatgagagaggatttccatcatgtgttaatgcatctttgccggcaggaagagagtacaccgtctgaacaagtgtccgaagacatcgaatgggccaatgagatggaaaaagaaacagcgctcgtttttgagaaaggtatgcttgacgaaggacattctgaaccatttgtgtcctgggcggtcggcctttggaaatcgtattgtgccaaaaaagcaccggtcatcaaaaaaacagaagcctttgcagctgctttggagtattttatcaatacgatctccaaatcggaaaaatcgatatcccaagcaaagcttgcaaaaaaatacggcgtcagcgcttcgaccgtatcgaatcgttttaaagatattgaagccgtcctgcaggatgaacttgaccatcatcttgagcttatgccatcttaaaaaagctcacacaactgctaaaccttccggggaaccggaaggttttttgcgtttgattctgattaaatcttgagaaagatattttaagatatcggtacgatcagatcaaacaaggagagattatgatgagtacaattctactggaaacaaggcatcttcaaaaaaagttcggaagatcgcaagcggtctcagacgtctcattgtcagttgaaaagaacagtatttacggattgcttggaccgaatggagcaggaaaatcaacgactttaaaacttttaaccggaatcttaaacccaactgccggggatattttgtttgaggggcggcaatggaaaaggtccgtattaaaagacatcggttctttaatagaatccccgcctctgtatgataatttaacagcctacgagaatgccaaggtgcatgccgcattattgggccttccagatgcgagaataacagaggtgcttaaaactgttgatatgcatcataccggaaagaaaaaggcggggcagttttctatggggatgaggcagaggctggggatcgccatcgctcttttaaatcgccctaaactactcatacttgatgagcctactaacggtcttgatccgatcggtatacaagagttgagggaactcatcaggtcatttcccgaacaggggatgacggtcattttatcaagccacattttatcggaagtcgagcagatcgcagaccatatcgggattatcagcggagggtatctcggatatcaggggaaaatcaataagggagacgatcttgagcggctttttatggatgttgtcaaatcaacgcgggagaaagagggcggagaaaagtgatcggatattatgtaaaagcggaaaacctgaagtttaaaagaacattttcgagaaaaatgatcttcattgtgcctttgattaatatttgcttcgcctttttaatgaatccgggattttttgtagcaggtacgtataattggtggtctgtcatcttaatgccggtcatgatcgccttgctttgtgcacaatcacaccagaaagaaaagaaagcgtcgaattataacggcattttttcttctcctgtagatttgcatcagatttggtatgcaaaaataagcgtcattgcgctctattctttagcatctcaagctgtttttttaggattcatggttgggatgcagtttgtcattcctcaattttcgagcattcatttgacagtcattgccgcgaatctgctgctttggctcacgacactatgggagatccccgtctgtttatggatagcgcgaaagtacgggtttatatctgccgttttgttcaatatgctgggcactatcatattgggcatcatgtcggcatcaagccctttttggtggctgaatccttggagctggccgatcagggtcatgtgcccgacaattggcatccatccaaacggtgtgcctcttgagaatggcgatcctttaacgagctgggcagtcgttcctccggctgttgttctatctgttctgttatttgctattttggcgcgtctgactaggcggtctttttctcctgccgttgatcgcaaatcgataaaacgggaggcggtttaatttgttgttatttttcagatgcctggcggctgattttcaaaaaacaaagcgtacgtcttttatttggcttcacttgagtgttccggttatctgtgcgggtgtttttctgctttatttctataacagacagcccgatccatatcaattatatcgcacgtattttgaagccattgcgattgcattgccgcttctgattggaattgtgtgcggaatgacggcttccttagaggagcaggcaggccgttttcaagtgctgttgggcggcacggctcccaaattaacggcttatttaagcaaagtcacgctgcttctgatcatgaacatttttgcggtattcttggctattggactctacttattggggctcagagctctttttcatgtgccgaacctgccaagctccctttttttagaggctggggcatggctggcagccggaagtgtcacactttatttcatatactttttgatcagctgtacattcggaatgggggcttcgattttagcaggcggggcaggccttttgatgacagcgctgatgaacacgggattgggcgatgtcatttggaaatataatccctgggcatggggaatcaggctgacagggtataaggggattgaccgatttgtccaaattgatccgtctctccgctctgttctagatggggaaatcaagcagggggctttcatcatggtgtttgctataatagctgtattcgctctaagcatcatttggtttatccgctgggaaggaagaaaagcttttgaataatgaaaaaagggtggtcagcaagtggcgaaaattttggcagtagatgatgagaaagatattcttgtactcatacaaaatattttgcgccgcgatcagcatcaagttcatacgctaagtcaagttaacaccgaatctctcgacgtgttttcagggtatgatttaattttgcttgatgtgatgatgccggggatggacgggtttgaattatgcgagaaaatccggccgctggtagattgtccgatcctgtttctcaccgctaagacggaggaagaggccatcgttaaaggcctcctgactgggggagacgactatatttcaaaacccttcggcgttcttgagctcagtgcaagagtaaatgcacacctgagaagggaaagaagagagaaatacgagactaaacgggtgatttccggttttttatttcactttgacagcaaagaagtatttattcatgatcaaaagctgaatttaacaaaaaatgaatttaaaatatgtgagctattggctcagcataaaggacgaacctttacaagagaagaaatttatgatcatgtatacgggctggaaggcaatgctttatattcgacgataaccgaatttatccgcacgattcggaaaaaatgcaaagaacacaatagagatccgatcaaaacggtatggggcgtaggatacagatgggaataatccgcaaaaaaaagacactgcgcagagaactgatcaaatatatgctcactttgagcttcagcctgatcgcgatcacggctttatatgttttggtcaatatgataggaatgaatgcagggctgttttatcctgccaactacaatgaaatcgaagctgaaaagcttaagcccaggcttcaatcggctgaacagataacggaagacatgataccggatacaatgctgtacgccatactggacaaaaagtcgaaacaaaagacagcgggaaacatgaaagagacgaatctttcgattgtacggaaaaagatagagagcaggccttatgtcagctttagtcaaaaaggctatatgattatcgaacgcaaagacgagtattgtgtattggagtatcctttgcgcgctgagtttcggtctccactgctgagacggtttctcccgaactatgagctgacaagcatatgcatcatcgttcttcttttaattacggtcgtttttacggtgacaacccgatttgcaaacagattaaaagaacattttcaaactttaaacaccattgccgagcaaattaaaaaacagaatttaaattttactccggagttctcgaatattaaggaatttgatcatgtaatcagttccctgatggacatgaggaatgccctccaagcctccctacgggcgcagtggcatttagagaaaacgaaaaaagaacagatcggcgcattggctcatgatattaaaattccagtgaccatcatcaaaggaaatgcggagttgctgagcttatctccgcaaaatcaagagcagtcggaatatatcagatacatccttgacgcggggcaaaaaatcgaacagtacattgaccaattaatccatctctcaaaaactgaggaagcattacataccgagtacagagaaggcgctgtgaaaacgctagtcgaaagtgttctccatgagactgaagcatatatagggaacaaatcgattgacattgtgttgaaggagcagaaccttgaaggaaaaaaagcagtgtttgacaaacagctgcttcaccgagcgttgatgaacatcatgacgaacgccgcagatcacacaccagaaggcgggagaatcgattttgaagctgtgtgtacggctgatcaattgattttcacaatcactgacagcggaaaagggttttctcaagacggcctgcagaaagctgccgagcttttctatatggaagataaagcccggacatcgaatggtcattacgggatgggacttacctttgcacttcgtgttgttaagcttcatcaaggcgatttggcgattaaaaacagcgaagcaggaggcggacaggtacaagtgaccatccccctctgagaccagatcatcatttccatatctcttcattctcataatcaaaaaccttccggcatcggccgggaaggttttttacggttctccaagttcctgtttcaaatattggtacagctttgcatcagcctgtttcagcggaaacgccgcggttttgcaaaggatgccgaaggttacgctgatcgggtcatcgtcgataaaccggacaatcgttccgggaggaggaggggaaacgatgcttttcggaatcagggcaacgccgagtcctgcggcaacatagtttttcaaagctgtcatgcttccgatctccatcgtgttcatttggctccccggcagctcttgaaacgcgatttcgactttcttccggtaggtgcaattgttggccgtaatcagcaggcggtgctccctaatatctttcagatgaatgcgttcattgtttccggcggggtgtccctcagggagcagcactacgagttcttcagcataaagcggttcaaaataaagatctgttcccattgccggagtcgaacagacggcaagatccaggcttccttgaaccagccgttcccccaatgccgacgagttggcgatatcaacggaaacccggatcttcggataatccgctaaaaatctccccaaaatctggggcaattcacagctcgcgatcggttcgaccgctccaaggcggatatttcccgcttcgccaagcaataagtcggccatatgatgttgaaggtgatctatatccttgacaatatgtctgctttcttcaaaaaaaagcctgccggcttcagtcagacggaatgttttccccctctcgagcaaacgaatgccgaggtcttcctcgagctttttgatttgcattgtgaccgtggactgcgcataattcagttcttcagccgcgcggttaaagcttccgcaagccacgattttatgaaacgtctttaacgttttgaaatccatcccatcacctcaagttcaataaaattgaatgaaaccttcaaatgattcaattatacaaaatgatataaccgttatacactattaaacaatacaaaggaggaatgaatatatgccatttgtcaggatggatcttttaaaaggaagatcaaaggaagagcttcgccggatcagcagatcagttcaccaggcgatgacggaggcgatcgatgttccggaagacgattattttcaggtcatcacccagcacgatgaggaagagttctttttcgatcctagctatatgaacatcaaacggacgaaggatttgatttatattcacatcacaatgaaagagagaccgatcgaaaaaaagctggctctgtaccaacgcattgcagagcgtttgcaaaaaaacgccggcatccgccaagaggacgtcatgatcattgcagccgaaaacgtgaaagagaactggtcgtttgggaatggaacagcacagcttgcatcagttgaaagggagcgttgaaaaatggaaatgaaaaataaaacagcccttgtcacaggaggcggcacagggatcggcagagcggtatcgctcgctttggcaaaccgaggggcagcggttgttgtcaactattcgcgttccaaagcggaggctgaagagacggttggaatgattgaaagtcaaggcggccgcgcgctcgcggtgaaagccgatgtttctaagatcagtgaagttcaagacatgtttgatcgggcggtgggcgagttcggtaccgtcgatctgctcgtcaacaatgcaagcatcaccaggcatatcgagcttgatgacttggaaggggcttctgaagaagtctgggatgaactgtatgcggtaaatgtcaaagggatgtttaattgtgcgagagcggcggcaccttttatgaagcgaaataaacaaggcgccatcgtaaatgtcggcagcatcgccgggcttaccggttcaggctcttcgttaccctatgccgtatcaaaagcggcggtccacggtctgacgaaatcattggcgcatgcgcttgctcctgatattagagtcagctgtgtggcaccgggcgcggtatcaacgagatggtgggaggggaatgaagagaaaatgaagcggctcagccaaaagctcccgcttgagcggatagcggaaccggaagatatcgccttgctcatttgtgcgctgctcgaacaagaaacagttacaggccaaatcttaacggctgactgcggtcaaacattatagcgattataagcctattatcctatttctatatgaaaccatttaccttatgataaatcatatcgaaatagaaaaaagagggaagaacgtatgaggcgtttacaatcgttagaagccattgaaaaagtaaaaaacggggattatcatgttttgcgggatgccgaatggctgaagtatctcgttttaactgaagagcaaaatatcaacctggagcggatttcttcgctagagaacatgcctcagaatcccgtttttctttatgttgaacagacgctctccattttggagaaagctgacattcctgagctggaaaaagaaatcattgaagaggttctcatatggagtgaagcggctaagtgcggccagcctcataaaagaaaggaatggcgtgaaaaaggttttcagcttgcgatccataatatcgggtcggcgcagatttatgctgatcgaagacaggcgtacatgccggaacggcaggatattgaagaactcatccatattttgattgtgacgcatggactcgtcggacggtatatccgcggggaaacaaggtatcgccaattcactcctcttatcgattggattgaaacatctgaacttcagcacatcgatatcaggcgggttctatacgtgctgaacaaatgtatcattgaagcggtatcgccggcgctttgggattcgatagaacgagacgtgaaccgggtaatcggccaaatctgcacaggagaaataaagactggccgtttgcggaaaggatcagaaaactgcggggacaagcgctcgattccggtgaagacagcagccggtacgagcggtttttgagggagcattcggcggaagatacgctgagacgcttctttcagcggattgatttatggtatgtggaatccgccttgtcatcattcagttttgaagagtttgtcaaaatctttctgctcgtgcttcgttctgtcaaccctttatcagtcaagcacatcagctttgagccgctgatgaaggacatgtaccgtgattaccagggtgtgaggcatataaatgtttataaaaaacgaattatcgaagcgtgcttaaaagagatgtcgatcagcgatttgctttacggcgaggtgcctgtaaatgaacacgtttcgcttgctgttcagccgtttgatcaggcttctgagattgtcggcgtcacgttttcattttcgcaggcaggactgaagctgattgaattttgccaggaagcggagaaatcgcctttatatgaacgggcgatcgtgctgctttatgatttttttgagtttcgcaaggattcgtttgaccggctgcaaaatgaagcggcttatctgtctgatatgaacggtgctgaagattataaaaagaagattgccgattatgccgttggagaaagaatgctcgacatcggagccggaggcggcgtgatgcttgatttgctgacagaccagcatccagaagcagaggtcatcggaatcgacctttccgtcaatgtcattgaggagctccaaaaaagaaaagtgcgcgaacataagccctggcatgtgaaacaggctgatgcattggacctgcctgagtactttgagcaggaaagcgtcgacaccatcgtattctcatcgatattgcacgaattgttttcatacattccgtatgaagggaaaaaatttaatcatctcgtcattgcccaagcgttaaaaagctcctttgacattctgaagccgggaggcagaatcatcatcagggacggaatcatgaccgaaaacaaagaggaaacgcggcggatacggtttaaagacccggatggaatggatttcttgaagcggtatgtccatgattttaaagggagaaaggtgcaaatgcttgaggctgagaaggacgcggctgtactgtttgtgaatgatgcaatggaattcctctatacatatacatggggagaagaagcctatccgcatgaagtgcaggagcagttcggctattttacgccgtctgaattccgccgctgtatcgagaaagaattaggggaacgtgcgaacattctggtgttcgaacactatgtgcaggaaggatatgaagaacacctttaccctaaaatcgagctgacagaccggctcggccggcgtgtgccgctgccggacagcacttgttttattgtaattgaaaaaaagcacctctagcgtgctttttttagttgttgcttttaaggaagcttgagaagtattgttcggtcttgtaattatcagcatcaattttccatttgtcattttttgatttttcaagtttgacttcaacggttttctcacttgaagtcgcctctgcttttttgatttcttcactcatgatgtcaatcgcaggattgatcaattcatctctggacatgaagtctttgccgctgtctttcacatagtcttccagtcttttcttcactttcttttggacatctgtattatcgattggcgtaacggttgcctcaacagttgcttcatcgcctgaaattgattttgtaactgctttgacttgagatttttcttgataggcgttttggatggcgctgatcagtttattcaatttctttttatccacatcttcttcatcataatatcctaaagagcgaacgatagatttttgagcgccttcaaggtaatcggtaacgacttcacgcttgttttcgtcgaccagtttatcaaagttattattgtctttgccgaaaatcgttacgtctgtgtaagccagcaaagcttttgccggatcttcaagttttttggccgttttcagcaaatcgtcgctgccgccgtcgatctcgaatttgacaggatcggctttattttcaccgtacatgtcaggtgtgtattcaagctgaaactttttgcctttttcaacgatgtaatagatatttccgtcgacttctttgtcagaattcagcgtcgaagagcgaagccttttgtttctttcatcatatacgctgacgtccgacatttttgagtcgccttcgtaaaggctgaattggcttttatcaaccattaatggttctttccctgtatttttcacggaaacattgatctttagtataagttcattttcgtgcaggtttgttgatgaatcatcaggaagcgtatattcggagcttaggattttaacttctgcattatctgcttttttcgtatcttctttctctccgctcgcgcttttgctgcctccgcaggctgttgacacgactgctacaatcatcaaaagcatcatcagaaaaaactttttacttcgcatggtctgtctccttttttattatttttttcaatgttatgtaaatgaaaagaatgaggcggccagggcataaaggcccttcatcgggacaaatcttactcaagtcccggtcatttcatttatctaacagtgaaaatttgattataattcttcctttttccttagtttctttaaaaaaacagaaacaacatcactcattttaaggtttgaagaatcattaataaataggtgttaaatactaattttggtcaatgatttgcaggattaggcatgttttcaaactttggatagtaagaagagactaaaactaatggcatgcacttcggtgcatttaattgaggtttatccattttttactttagatcctggtcagatcaggttaaaaatataagtattttgtttaggagacgcccttatgttggtgaatttcaaatttgggccatagtgaataaaaagtcccgttttcgggtttccttaacctgagcttaaaatttagtagatcaattgtcttagaaacggcggttttgatggtgtaaggcttttctatagtcagagagatggaggcatatatgggggaatgcagccgggggcaccggctgcatattgtggaccggatgtttacttaataccaattatcatagcgataacaatcgcagcggcgccgatgataatccagcctgcgatcagcttccagacaaacttgacccagcgttcataagggacgcctgcgattgacagtgaagccatcaatacgccggaggtcgggatgattgagttggtgatcccatctccgtattgataagcgaatacggcaatctgacgttcgaatcccaataaatcggccagaggcgccataagcggcatcgttgtggctgcctgtccgcttccggatggaataaacgtgttaatcgcgatttgtacggcgaacatgccgatggcgctgatttcattcggaagcgagctgattgctgaagcaaggctgttgatgatcgtatcgataatatgtccgttttccaatacgatgacgatggcgcgggcgaagccgacgatcagcgctccgtatacaacctgtttcatgccgtcgacaaacgaatggaaggtgttgttgatgccgcgtcctcccgcaagaccggcggcaaagccgatgatgagaaagccggccgacagctcgcttaaaaaccatccccattgaaaaacaccgaacatattgatgccgaagcccaatgctgtaatcagcaggacgaggccgtgtcttccggtgaaggaaagatcagcgtgtcctgcggctgtctcttcatttatctctgtttcgcttccatacatcaaaccggtattcgggtgcgctttgacttgttgagcataacgcatgacataaaaaatggagaaaccgagcatggcggcataaacggccagtctataaccgaaggcgctaaacaccgggacttccgcaattgtctgtgcaattccgactgtgaacggattcaacatgccgccggtgaaccctgcagccgcgcctagagaaatcatcgccagccctgtcattgaatcatagccaagcgctctcgcaacagcgattccgatcggaataaaaataatcgtctcttcagacaaaccgatcgttgcgcctccgatggaaaagacgaacatggtgacggggatcaggaggaagccgcgtttcttcaagcgctgcacgagcacatggacaccggcgcgaatcataccggtctgatggatgatgccaaaagctccgcctattaaaaagatataaaaaataatatccgccgattgaatcatgccctccggtatggctttaaacatctcgaaaaaaccgaccggacctgcgtcagtctgcttgtagctcccttgtacgataaccgtttggccgtcttcttcaacccgcttaaattctcctgatggaatgaagtatgaagccagtgcagctaaaatgataatgaaaaaaatcaaagcataagtatgtgggaagtgcagttttgttttctgtggggtgccattgctcattccgttcgtctcctttataatgtattaatattcagataattatatatttaaacattttgaggatatgagctttactttgtcaaccctggaaaaaactttcggtaatcgagaagggagaaccgttatgaaaaaacaaattgagaaagagatcgaaaatattcgtgaagagctgctgcatatcagccagtatataggcaatcatcctgaactggggcacgaagaattcaaagcttcaaagattctgtccgaggagctgaaaaaacacggttttcaggtggaattaggcacatgcggccttgcgacggcgtttacggccgagtttgacagcggccgtcccggtccttccattggatttatggctgaatatgatgcattgcctgaccttggccatgcctgcgggcacaatttgatcggcacgatggcggtcggcgccgcaatcggcgtcagcaaagtgattgcatcgtgcggaggaaaagtgtatgtttacggaactcctgcggaggagacgaaaggcggaaaagtaaccatggccgaacaaggggtttttgatcacttggacgccgctatgatggttcatccgtattgcaggcatgaaaaaagcgggacatcgctggcgatggatgcgatccaattcgaattcttcggaaaggcctcgcatgcggcgggagcacctcacgaaggaatcaatgcgctcgatgccgtcattcagacattcaacggcattaatgcgctcagacagcacattctccctgatgcccggattcacgggattattccggagggagggaaagcggcgaatgttgtgccggattacgcggttgcccagttttacgtcagaggaacggaacgcgcttatgtcaatgaactgctcgataaagtgaaaaattgtgcaaaagcggccgcacttgcgaccggagcccggcttgagagctctttttatgagctgtcttacgatgatttgaaaacaaatgaaacgctgtcagacgcttttacacaaaacatgatcgagttgggcgtcgatccggattcgattcatgaaaaagcggacggaggaggttcggttgatatggggaatgtcagccagatcgcgccttccattcatccttatgtgcaaatttgcgatgagccgtatgcgtgccacacacccgagtttcgtgaagcggccatgagcagccgggggttcgaaggcttgatgctcggcgcaaaatctatggcattcaccgcatatgatgtgctcatcaatgaagagctgctgaaaaaaataaaggaagaattcaaccttttaaaggcgctggcctaaacggatgatccgaaaacgatcaagtcctgttttgatgaatattgacgagaagccgccggggagcccggcggcttcagcgtgtcgacaaaccctcgcattcgttgtcaggcctgcgcgccggtgcctaggaattacaaacattggctgttctagactgcaaggattgcgtttcacgctgaaaagatgacaaaatcccaaaactaacagtcgtttacaggtcgagcgataagcggatcatatcgatgcagcgcatgccgttttcgtatatcggcttctcgtaatgtctcaggaaaaagttccggtcgatgccggtgattctaaatccgcatttttgatagagcgccagctgaccgatgcttgaattcccggttccgatttcaatcgtcttaaatccttgagctttcgctgtttcaatcgcatgcataaccaattgtctgccgattccttttccctgcagatcttctttgacggcgatattgacgagctctgccgtttcaggcctcgtcggcagcagcacatagacaccggcaatccggcggtcgatttcggctgtatagcactgtccccgtttgaggtaatcgttaaccagtttttcggaagggtctgccgtcaacagcaaatcaagcggcggctcatgttctggatgcaatctccgaatgttcatttcactcatctccttttgatctaaacagaaatcgttgaaatccccaaaaggctcatgcacaatagtaagcacaagcgaacagtaaagtgaggtactgatatgaatatatctgactatgtaaagcatgacgcggttgctttatctaagcttatcaaacatggggaagtaacggtcaacgaattaatcgacgctgctttttcccgtcttgaagaagtcaatccagaactgaatgcagtcattcggacaagaaaagagcaggtcaaaattgaatccaaacagcttgacatcagacaccagccgtttgccggggtgccgattcttttaaaggacatttcccaagcgttgaaaggggagcctctcacagccggcgccaagctgctttcatcttataaaccaaagcgcgattcgaatttcgtcgcgaaattgcgcggcgccggttttttatttctcggacagacgaatacacccgaatacggattaaaaaatatttctgagcctgaattgtatgggccgtcgcgaaatccttggaacactgattattcacccgggggttcaagcggcggttctgcggctgcggtggcggccggaatcgttccacttgcaggggcaagcgacgggggaggctccatccggataccggcttcctttaccggactattcggtctgaaaccgacccggggcagaacgcctgtaggacccggcgccggacggcagtggcagggggcatcgatcgattttgtgctgtcccgtacggtcagggacagcgcggcgctcctggatattctgcaaaccattcagcctgaagccgcttttcaaacgcctttatttccaggtcagtatgaagaggatatgaaaaaagggctggagcgccctttgaaaatcgcattctctgtagaatcacccgtcggaacgcctgtcagcgatgaagccaaacaagccgtccgccgcaccgttcgatggctggaagcgcagggacaccatgtcgaagagcagacgaacggcgttgacggaatccggttaatggagaactactacttaatgaacagcggtgaaatttccgcgatgattcttggaatggaaaaaacgcttggaagagcgatcactgttcaggacgttgaaattgtcacatgggtgctgaatgaagcaggcaaaaaagtgtcggcagccgaatttacagcaagccttgcttcctgggatcgagcagctgcacaaatggcggcgtttcatgagacctatgatctgtatgtgaccccggcaacggcttaccccgctccaaaggtcggcgagctcacccataccgaaaaagaagccgaagcgctcctgaaagtgagtgagctggaaaaaatcgagcagcagtcgctgatttatcaaatgtttttgaaaagcttgacatatacaccattcacacagcttgccaacttaaccggacagcctgcaatgagcgtcccggtccatctgacaaatgaaggtttgccgctgggtgttcaagtgacggctccgaaaggaaaggaacattggctgctgcgcaccgcccatttattagagcaatcagacttatggatcggaatgaaaggaaatccaatgctcggcagtctgtaaccgtataagagagaaccgcccgttaatcaggccggtcttcttttttatcgtacagtttttcaagctcgtcaaccaatgttccgacatacgtcacagcccggcggatcggctggtctgtcgacatgtcgacaccggcgtgtttcaacaagtccagcggcttcatggtaccgcctgcttttaaaacgttcagccatctgtctacggcagggcggccttcttctttgatctgttgcgagacgatcgtcgatgctgtcagcccggcagaataggtgtaagggtataaccccatgtaatagtgtggctgacgcatccatgttaagcttgctccttcatcaaccttaactccgctgccccagaattcggagagcacggcgctagtttgctcagacagtacggaagcggtaagtgcgtgcccctgttcggcgagctcatagactctccgctgatattccccctcaagcagatgggtgacgaaattgtggtaatacgtgcccatcagctggttgatgacccagcgcttcattttcggatcatttgttttggaaaacaaatgctgagcgagaagcatttcgttcattgtagaaggcgcttcaatgaaatatagagacggtctgacattcatgatgcgctgctctcggttggcaaagtaaaaatggccggcatgaccgagttcatgggcaagggtaaaggcatcccgcatcgtatccgtccatgtcatcaaaatgaaaggatgcgctccgtacggacttgaacaaaacgcgcccgtagatttgccgatattgtcagcgagatcaacccaccgctcagtcaaggcggtttccatgacttccgtgtactccggccccatcacttgtaaagcgtccaagatcatccggccggcctgttcgtaagtcgtctttggactgaagtcgtgatcgagcggagcctgcaaatcgcagaagcgcatttcgtcgaggtctaatacgcgttttttcaaggcggcatacttgcgcatatgaggtgcaagttcgtttttaatcacatcaagctggttgcggtacatttcgagcgtgacgctttgcggctgaagaagcatatgggtgacggattcatatccgcgcagccttgacatgctgacctgttttttgacctctgtttcatagatggcggcgatggtgtttttgtatgtttgcagggtattggtaaaggagtcgaatgcggttctgcgaatatgcgtatcaggagagaacatgtattttccttcatataacgcgaacgaattggcgagtgtattgccgtttcggtcctgaatcggggaaaattgcatatccgcaagcttcgccatcccgaaaattttgtacggggcatcatgtatttcgcctaaaacggctagcgcttcctctgtttcgggagcaagtttatacggcttgagttccattatctccgtcagcattttgctgaaaggctccagtcctttctcgttttttatgtacgtctccacttgattttcggggaattcaagaatttccgattggataaatgaaagcccggcgtttatttttgcttgcagcgcggccatccttgaagcatcagcttggttgacggggtttgtcaaatcttcggactttctgaggtgagtataggcggcggcccggactaggcgcttcagcagtatctcccgcagcgataaacaatccagcaatacgccggctccttcatgcagccttcctttaaatgagccgatggatgcgagatcttcctcaattttcacaagtgcgtcttcccaagcttcataagaagaaaataaatcagtaagattccaagtcagttcctccggcacctcacagcgctttggtcttttttctgccactttttccaatgtgcagcctccccttgaaaatatttcgtgtttctaattaattatataaaagacggcagcataatgaaataaaaaacgacggcttctaaagaaaccgtcgcaaaccgtctgcttattgagcattgcgatttcgaccgcccatgcttctcatgacgaggctgacgatgaagatcaaaatgatcgccccgatcaaggccggtatgatattaaacccgccgaccaccggaccccagcgccccaaaatcatcgagccgagccatgaaccgataaatcccgcaataatatttccaatgattcctccgggtacatcacgtctgataatgaggccggccagccagcccaaaattccgccaatgatcaatgaccaaataaaaccaaacattgaacagtacctccttgttttttagacattttaagccttatacctatcttttggaattcgtgaataaatatacaaattttttctaaatgaaaccatttgggcgaacaaacgtatgaaatacggacaccatgaaccgtcataagactcttaaatcaagtgaggagagtaagatgaaacagtcattaaaggcattaaaaggctttcgggcattcgccgaagaaaaaatgaaagagtggaacgttcctggagccgcggttgcagtcattaaggaagacgagatcatcatggcggaagggtttggattcagggataaagaacggaaattaaaggtcaacccggaaacggtatttgcgatcggttccgcctccaaggcatttacaacggcggcgatggcggtattggctgatgaagggaaaatggagtgggataagccggtaagggaatatctccctgagtttaagatgcacgatccggtagcaactgaacggatgactccccgtgatctggcgtgccatcgttctggtctcccaagacacgaaatgatgtggtacaattcctccttttcaagggaggagcttttcagacggatccgctaccttgagccgaatcaggattttcgatcaaagtggcagtatcagaacctgatgtatatgacggctggttatcttgctggaagaatagcggggacgacatgggaggatcttgttcatgagcggcttttcaaacctttgcatatgacatccagcagcttttcggtcgaagatatgcaaaagctttccgattttgcctttccatatcaagagaacaacggaacggttgaaaaaataccttttcgtaatatcgatgcgatcgggccggctgggtcgattaattccaatgccgtggatatggcaaattggctgcttcttcagcttggcagcgagaaattcaacggggttttatcagatggaagccttcatgaactgcatacgccttgcatttcctgcgactccattattaaagcgaaggagcttccggtctgcagctatggactcggctggtttgtggaaccgtaccgcggtcgccatatgattcatcatggcggaaatatcgacggcttttcatcgcttgtcgctttcatgccttatgaaaagatcggcattgtcattttgacaaatatgaacggcagctttcttccaaatgttctggcgtacaacatttttgaccgcttgcttggattggaagagatcgattggagcggccggctgaaaggcgaagcggaaaaaataatgaaagccgctttaggagtggatcgaaccgcggatcttaacaaaattgaaggaacgaatccttctcatgccctgaaggactacacaggtgtatatgagcatcccggctacggcgaactcaaaatagagcttaaagactgcgtgttacaggcgctcttcaattcgtttgtgatgcctttgaagcattatcattacaatatattcgagatgaaaatgccgctcacggagatggcgatgctcgcatcattcgacaccgatatacacggacatatcagccgcctttccataccgtttgaaatggcggaaggcgctagagaaatcgaatttgtcaggaagccggatcagcaattgtacgaccctgaatttcttgcttctttaacagggaagtatgcattggaagacggaacagatgtcgttgtgtctctcagaaacaaccggacgctctgggtttcattgcccggtcagcctgattacgaacttgaaccttaccgtgagttgacatttcaaataaaaaatctgccgggattcagcgtccgatttgaagccggcgattccggacaggtaacaggtttgcgcttcatccagccgaatggagaatttcctgctgtccggaaatagcagcaaaggacatatttcgatttatttcccgagaaatatacaggtgtgagccagtctggtcacttctggacggcttccagtaataaatccgccagatgaacggctctcactcggtctgtaagtcctgctcgttcaatgccgagcttcatttgcagcagacatccgggattagccgtaacgatcgtagcggcccgggtcgctgctgctgcttccattttagtatcgagaattttcatcgacatttcggattcgacaatgttataaatgccggctgatccacagcagctttcggcatttttcatttccttgaattcaatgcccttgatgctgcgaataaggcgtctcggctcagcggacgttttcatgacatttcgcaaatggcacgaatcttggtatgtgacgatttgctccggcagttcaagggattgctgatcgaagttcagttccaacaagacggaagaaaagtctttcaattttcctgtgaaagatgctgcccgttcccgccattcggagtcatctttcaggagatgatcatattcctttaaaaaagctccgcatccgcctgcatttgttatgataaagtccgcgtttgaatcctcgaatgcctgaatatttcgttttgcgagcaggatggcctcagacttttcgctgctgtgtccgtggagggcgccgcagcaggtctgctgttcgggaattatgatctcgcagccagccagccgcagcagctcaatggttgccatattcgtatccaaaaacagcgtatccatgagacagcctgagaaaaaggcagcccgtttttttctctccccgatcgcagggagcaggtgcggccgttttttcagctgtttcatattaggaaccttcggcaaaaccgcctccatcttcgcgaggtggtccggcaaaagccggagcaagccggatttgcgaatcacgttttgcatgccggaacgctgatacaagccgagcattccggtcagcgccctgattctgtttggatgggggaaaagccctttgaatactgcgcggcgaagcactttaaccggaaaggcgtgctttttgttctgctgaataatatctctcgcttcttcaagcaagcgtccgtagtttacgcctgacggacaaacaggttcacacgcgcggcagccgaggcaaagctcgagtgaccgttcgacatcctcatcaggctcgatcgtcccatcgacgaccgctttcatgagcgcgatgcgtccgcgcggagaatggctttcttgaaaaccggattcgatgtaggtggggcatgacggcagacagaagccgcagcgcatgcaattcagcagctcttcctcatccattctttgtttaaactgctgttcaatgacctttctttcgtcagctgtcgtcatcttgtcaccaccactcgcttgcgggagtctttcgcaaatatcttcccgggattcatgatgttgtttggatccaatgcctgttttaccgccttcatggcggcgattcccgcattgcccagcttcagttccaaatagggggctttcatttcgccgaccccatgttctccggtaattgttcctcccagttcaaccgcttttttaaagatgtcttcaaaagcctgttcgacccgtttcatttcttcactgtttctgacatctgtcgtacaggtcggatgaaggttgccgtcgcctgcgtgcccgaatgtacaaatcgatatttggtgcttttcggcgatcgaattaatcgcttttaccatttcagcaatttcagaacgcggtaccgtagcatcctccagaatggtcgtcggctttaaccgcgctaaagccgaaagggcggtgcggcgggcctcccgaagattttccgcttcagcttctgtttgcgcagtttgaacggacacagcatttccttttttgcaaatctcttcaatcacggcgatatcacggcgaactgcatcttcggtgccgtcctgttcgatcaggagaaccgctttggcatggacgggaaggccgattttcgcgaagtcttcgatcacctgaatcgtaggttggtcgagaaattcgagtgtcgtcggaatgattttatgtgcaatgatatttgaaacagtttgtgctgcagagtcgatatcttgatagagagcgaggacggttttttttgtttcgggtgccgggatgagttttaatgttgcttcagtgatgacgccgagcgttccttcagaaccgacgaacagacgcgtcaaatcatagccggcaacatctttggccagcttgccgccggtgcggatgatgtccccgtttgcaagaacgatttccagcgccatgacataatcgcgggtcactccgtatttcaagccgcggaggccgcctgagttttcgttaatattcccgccgattgtcgagatcttcattgagctcggatcgggcggataaaataatcctttttcttcagcggcgtgaattaagtcaagtgtgatcacaccgggctggacggttatcgttaaattttcttcatcgatttctaaaatttgattcatatgcttaaacaggaggacaatccccccttcagtcgggcatgtgccggcacataggtttgtacctgaacctctcggcacaatcggaatgcggtgcgtgttgcagattttcacgattcgcgatacttcttccttgctgcgcggggcaatgaccgcgtcaggcatcgattgaaactgtggtgtcgcatcataggaatagacgagccgtccggcgttcgaatcgtcataattggcagagccgacaatctcaatcagcttggatctcacttgtgaggaaatcatgtatgatcacatcctttaccaattattatacaaaatcaaacgctttcaaaaaatcattcttttaaacttcaaatataaaaaagaacccgttttcaaaggaaacgaggttctttgcggaaagcatcaggttgcaaggctgattgcttgattaagcacttttgccccgtccatcattccataagccatttggtcaatgacggccacgggtgtatgatacggcttggcacgctctgtcatttgcccttttaaataccggacctgcggaccaatcagtatcacatcaatttcatccagatcgcttggcaaatctgcctcagcatacgcattaatttccgccttcaatgaacggttttccgcttcttcccgcattttttttaccaatatactcgtagacattccggctgaacatacaagtgcgatcttcatttttctcttcctttcccaagctcttgatataaatcaatcatttctttcgccaaatcttttacagttatggctgtcattaaatggtcctgagcatggattaataatagattgggtgaaaggcctgcgccctgtgcttctttttgcaggaggcgggtttgtgcctgatgcgcttggttcagctccgattctgcttcttgtatcttttgataaccggtttcgcattcgtgatgtttcacaagctgcaacgcttccattgcagaagaacgcgcatttccggcgtgaaggatgatttcaaatgagacctgttccaattgaagtgtatctgccataacattcactccttatttattcattttctgtctggtgcaaggcggaacgttgagccgcttttataaacgggaggtagagcagggtggccagcaccaggttgaagatttgcaaaaagacccctcggactgatcctccggtgacaagatatccgctgacaatcggaggcgtcgtccacggaaggatcgccacagttttcgggacgagaccggaagccaaagcgatatatgatgtaatcgtcaaaattaatggaatcaagataaacggaatgaacatgatcgggtttaatacaataggaaggccgaacagaacgggttcattgatgttaaaaaggccgggtgcgagagacacctttcctatcgttttgtagtgcttcgatttcacggcaattaaaatggcggcaagcagagccaatgttgttcccgatccccccataaatacgtaagaatcgaagaaaggctttgtcacaatatacggcacttcaaaagcgctcattccttgcgagaataagtgctgattttcctgaatgagcgggaggtagacggattccatgatcggcccgaggatgtttgttccatgcaatccaaagaaccagagcaaatgattcaagaaagtaaaaatcaaggctgacccaaccgtgttggaaaggccttgaagcggctcttgaatcgtgctgaaaacaagctcatggatgctttgccccgaaaagtgaacgatcagagcgttacatagcccggcagtggataagatgacggcagccggcaatagagcattcaaggattttgtgacgccgtcaggcactccttcaggcattttgattttcaatttctcatttttggaaaacagccggaagacttctgtcgacagcaaagccacgattaagccgacgaacagaccttgggctcccagccaagtcattgagaagccaaagtcttcagtggtcggtgtaagcacggcgaatgcgccaaccccgattaatgcggcagacagaccatctgtgtgatatgactcggccagcttgaagctgacagccgcaacggctaaaaggctcaacagagcaaaagagccattccatatcgctccgccgacagccgtccatccctcgccgaaaagaccggtcataaagttttgaaacgccggtattggaaaattattgaccaggatggcgagggaaccgatgatgataagaggcataatggcgatgaatccgtcgcgtattgcaatcaggtgcctttgggaaccgatccttccggcgatcggcatgatgtttgattcgatgaatgccatcattttattttgtttcatgtgcacggacctcctcaaaaaattgcgggagataacgtttatgagcctcgagcatttcatcgagcaccttttgagctttgtgatcagaagagaccaatggattggtgatcatggctaagtatgccgtatcgtagtcgccggtgaccgcagcttcaatcactaattgttcaaattttttcatcaagatgatcggcccgctgatggcatcgggcagttttccgacggtcaggggaatcggtccgctttttgtaatgacactgttgacttcgatcaccgcatcatctggaaggtctggtatgcttcctttattcagtgtgttcacggtctgaatatccattgaatgatgataaagcgagttcattaatgagcaggctgattcactatagtaagctccgccgcggctttccagttctttaggcttttcatggatcttggcgtctttgtatctctcaaacagctgccgctccacttccatgacggtttctgcgcgcgtccctttgttattgtacgcttcgatatcttttgcgagcgcatcttcatgttgataatagtactgatgataagggctcggaagcattcgcaaagaccgcaaaaattggagattccacggcagcgccgcaatattggaaggcgagtagccgaagtgatcattcaacagaagctcaatcgtctcttctgtccggtcgatcccgtcgatccaaactctttttccgaaaacaaaatgattgatgcccgcgaattcaatcatgacgaggtttacatccacgccgaaaatttctgcgatgctatttttcatgttgtaaggaatattgcataccccgacgaccttttgatgaggtccgtgcttcagcaaagcttccgtcacgatgcccgccggattggtaaagttaatcagccatgcttcgggacaaatctcatgaatatcgcgggcgatatccagcataaagggaattgtgcgcaaagctttaaacatgccgcccgccccgtttgtttcctggccgatcaggccgtggctgagcggaattttttcgtctaaagctctcgccttcagtccgccgactctgatttgaaccgttacgaaatcggcgcctttcaatgcttttgcccgatctattgtatggctcagttcgatgggaacccccgcatgtctgatcattcgcttcgcgagttctgagacgatgcgaagcttttctttgccctcctcgatatcaaccagtacaatctcattcactggaaattgatgatgccgtttgatgatgccttcaatgatttctggtgtgtagctggaacctccgcctataacaactactttcagcgccataatccccctccttaactctcttttatgaaagcgcttcacacaattgaaacttaacatgttataacaaatttgtccatacatatttgttataacaaattgttttttgggggaactttttgtgttattctataattacgaactcaccccaaaggagaaaatgtatggcgaaacaaccacagctccacagtcaaattaaacaagatattgtagataagattgaaagcggttattatccgccgggcagcctgttgccgacggagtccgagttttgcaaaatttatgatgtcagccggacgacgctgcggaccgcgctgaatcatttgcttatggaaggggctatttaccgaaagcagggaaaagggacatttgtcgccaaaggaaaagtaaagcagatcttaagctccagcagcctccgctatgcagaacaattgaaggctcaaggctttaaaccgaaaatcaaggttgttgatttgcaaaaaataaagccgtccgaaaaactccaaacccgtctcggaatcgacgctgaacaaatggtctatcaagtaaaaagaatccgctatgcagacgatgaagaaatccagtttgaaacagcctatatcagaacggatctcgtacccgaagtaacggaagaaatggcgaatatctcactttaccagtgcatcagcaggcagggaaacaacattaaaagaacagaggagcaaatcaagattgtgatttctgatgaggagattgcacaccatttaaatattacacaaggcacgccttgcttccagatatcgacgcaaacatttttggcgtctgaagaggttgtcgagtattctatggcctattttcgcggtgaccgcgttgagttcttcattgaacgcgattatggacaaagggggaaatgaaagcgtgaaatctctaatcataaatgcagatgattttggattttcaaggggagtcaaccttggcattattgaagctttccagcacggggtcctcacatcgactaccctcatggtcaatatgcaagaagcggatcatgccgtcgaactcgcacggcaaaatccagaactcggagtcgggatccacttgacattgacggccgggcgtccgattcttggcggactgcatacgataacagatgaagaagggaattttcgcaagcttttgtattaccaaggttttttcgacattgatcttgaggaagtatatcgagagtggaaagcgcaaatagagaaggctttgtcctgcggtttaaatccgacacatatcgacagccatcatcatattcatacatacggaaatctccctgaggtgtttgtagaggttgcgaaagagtatgatctgccttgcagaaaggtcaatcatgaccatccttcactgtggaagggtgtaaggtcgaacgatgcttttgagctgaaagtcgaccgattgaaggatctatcgagcttctttaatgattatcaagacgcagctgtgattgaagtgatgtgccatccggcttatgtcgataaatgtctgcttgaaaaatcgtccttccattatcctcgggcatatgaactttcactgctgacggaaccttctctcaaagccgctttacaacactgtccggatattcgcctcacgtcttacgccggtctatgaaagagatgccgcttctattccttggcttaataagatgtgaaatggggtagaaagcggcggttgttttattcaattacttcatgttgacagttcagaaaattctgattaatataaatttgtcataacaaatttatgcattcttcacccattggaaagtcttcttttacacttaaatgtatagacgtctatacgtgtttcaccctctgcagaaccagcttttcaaacgccaaaattttaatgaaaccatgctgtcgatctcacttttgtaagcgttttcccttgttgtcttcaatgtatctgctgctattagatgacaaggaaaaatataaaaccagcaaaaaaggcggtgaggaaaaagagagttctagtttcatagcttgccaaaaaattgcttgtaaaggagatgaaaatcgtgttgatcaacaaaagcaaaaagtttttcgttttttctttcatttttgttatgatgctgagcctctcatttgtgaatggggaagttgcaaaagccgattccggaaaaaactataaaatcatcggctactatccatcatggggtgcttatggaagggattttcaagtttgggatatggacgtttcgaaagtcagcaacattaattatgcctttgctgatatttgctgggagggaaggcatgggaaccctgatccgacaggccccaatcctcaaacgtggtcatgccaggatgaaaacggagtgatcgacgcgccaaatggaacaatcgtgatgggcgatccctggattgacgcacaaaaggcaaatcccggggatgtctgggatgaaccgatccgcggcaactttaaacaattgttgaagctgaaaaagagccaccctcatttgaaaacgttcatatcggtcggggggtggacttggtctaaccgcttttcagatgtcgcggcagatcctgcggcaagggagaatttcgccgcttcggccgttgagtttttaaggaaatacgggtttgacggggtcgatcttgactgggaatatccggtcagcggaggattgccggggaacagcacacgtccggaagataaaagaaactacacgctgctcctgcaagaggtgcgcaaaaaacttgacgctgcagaagcaaaagacggcaaggaatacttgctgacgatcgcatccggcgcaagtcccgattatgtaagcaacactgagctcgataaaatcgctcaaaccgtggattggattaacattatgacctatgactttaatggcggatggcaaagcataagcgcccataatgcaccgctgttctatgatccaaaagcgaaagaagcaggcgttccaaacgctgagacctacaatattgaaaacactgtgaaacgctacaaggaagccggtgtcaagggtgacaaattagtgcttggaacaccgttctacggaaggggctggagcggttgtgaaccaggggggcacggagaatatcagaaatgcggaccggctaaagaagggacatgggaaaagggcgtattcgatttttcagatcttgaaaggaactatgtgaatcaaaacggctataaaaggtattggaacgatcaagcaaaagtgccgtttttgtataatccggaaaatggcaatttcatcacttatgatgatgaacaatcattcggccacaaaacggattttattaaagcaaacggattaagcggagcaatgttctgggatttcagcggcgattccaatcggacgcttctcaataaattggcagccgatttagattttgcaccggacggaggcaatccggagccgccttcatcggcacctgtgaatgtgcgtgtaaccggaaaaactgctacaagtgtcagcctggcgtgggatgcgccgagcagcggagcaaacattgcggaatatgtcgtgtcatttgaaaaccggtcgatatctgtaaaagaaacatcagcggaaataggcggcttgaagccgggtacggcctactcatttactgtttcagcaaaggatgcggatggaaagctccatgccggaccaacggtagaggtcacgacgaattctgaccaagcctgttcatatgacgaatggaaagagacgagcgcatacacaggcggagagcgggttgcatttaacggaaaagtgtatgaagcgaaatggtggacgaaaggcgaccggcctgatcaatccggtgaatggggcgtatggcggctgatcggaggctgcgaataagagaaagtcaaatggatagaaaacgataaagagagatttggggaacagcttctcacgtctctctttatggacaaaggagtctgagtaaacatgaagaaagccgcttcatcttttttatcttgtatgctgctcctcgcgctttttatcccgaaccggcagatttccgcagagacttcaagcgaaagaccggactgccgtccggaagggctatgggactcgggcgttgaacatgtgccgtattgcgatgtatacgacaaggacggccgtgaaaagctggccaatcagttagaccggagaatcatcggttactttacgagctggcgtacgggaaaaggaaatcaagatcgttatttagtaagcgatatcccctggaagtacttgagccacattaattatgcgtttgcccacatcggggaagatcatcggatttcagtcggagaagaggcagatgagaacaacccgtccatcgggatgacttggccggagcatcccgatgtaaaaatggatcaaaccttgccgtataaggggcattttaaccttatccatcaatataaagatagatacccggatgtgaaggttttggccgctgtcggcggttgggccgaaaccggcggctatgtcgacaaggacggaaagcgaattccaagcggcggcttttactcgatgacaacgaatggagatggatctgtaaaccacaagggtattcacacctttgcggaatcggtcgttgcgtttctcagaaaatatgagatcgatggaatcgatattgactatgagtaccctacatcgatgcaggatgcagggaatccggcagattggaacatcgccaatccgcggcgcaagggattaaataaaagcttcgaggcattgatgaaaacattaagagaaaagcttgatcaagcgtccgctgaagatggaaagtactacatgctgaccattgcagcaccatcctcggcatatttactgagggggatggaaacgtttaagccgcttcgatatgtcgattatgtcaatatcatgtcctacgatcttcatggagcctggaatgagtttgtcggaccgaacgcttctttattcgataacggcgaagatgccgaactcaagcagtccaacatttatactacgccggaatacgaagggatcggatatttaaatacggactgggcttaccattattttagaggggcagtagaatcgggacgaatcaatatcggtgtgccttattatacgagaggctggaaaaatgtgaccggcggagcaaatgggctgtggggaagagccaaaagcgcagattgccctcagggactcaggcaatgcggtgacggagcaaccggaatcgataatatttggcacgataaagatgagcaggggaatgaaattggagcaggggcaaacccgatgtggcacgccaaaaaccttgaaaagggcattgctggttcttatctggaaaggtatggattgagcaaggctgatttgacaggcgtttataaaaggcattatgacgcagggctggcagcgccttggctttggaatccagaaaagaaagtatttctatcgacagaggatgaggaatcgatcaaaacgaaggcggattatgtcattgataaaggaatcgggggtgtcatgttttgggatttgagcggtgattatgactggtatcccgaacgaaacggcagtaaaggagaatacggtatcggcaataccttaacgagaacgatgtatcataaattctcggatacaacaccatacgataatcgactcagcacatcacctttgcctgatgaatcactagatgcagaagtagagttgacgaactttccgttaggagatcaaaattacccgatccacccggtgatgaagctgatcaacaacagcgatgtcacgattacgggaggttcttttatcgaatttgatgcgccgacatccacttcccctcggtttagaagctggagcggcgatcatgttgaagtgatttctaaagggcatacgggaccgaacattggcggactgacaggagatttccaccgcatcagagtgactctatcaagctggaaaaccattaaacctggtgaggaagcggagtttcagcttgtctattatttgccgatcagcggtccttcaaatttcacgatatcaatagatggcaaaaagtacaggcttaaaggaaattaagtatacggccgttagatgtgacagcccgttccaaaaggaagcgggctgtcttcgtgtattattgtgcgctgtttttccagttggtcaaattgtcgaacacctcttttgtaatccgggtgcctctgttgtacgaggagccgccgtatactccatttgtgtgtacggcaagcgagcacggaccgctgcagttcgttctggagctgctttgttcgaataccggtgaaccgctttgtcctccgtacgtgtccattgcgtactgcaatttatacgtttcggagatggcaatcggtcctgaatgctgccattgtgtgcctgctgttttatcgcctgggtagccgctgatggtaacagttgtcccaacaagtgatgaagtagtgtacgagtatccgaagtatccgacagtattgccgatcggttcgcttagttcgattgctccgtaatcgtaattggtgtttccgcttctccatcctgacggaataaagtagcgcgtcgatttaactgagccgtaaggatagcttgtcccgttccgtcccggcgaaacagtggctgtaccggcaaatgaaccgcttgatgtgtcatagatgcagtgtccggctgttgcgacggttttcggaccgatcatccatccggtgcatgaaccgatgctgcttgaaatatgaacgatcgctctgtacggatatgcggttgtgttggtgacccttgtccgatcatcagaaccaatcaccgatttaatgctgtaaggagctttggcgggtgactttttttccgctttttcctttgtttcattcactttgccggtgcctgtaaacgcttttgaatacaagccgtattgatcgctcttaatgtgtgggtcataagtaaccgatgtttccgctttgtatgaaggatcgcttgaaacaggagtatgaggcgatggcgcggcttgggccgggtgcatacctaaagaataaatagaaataccaatgagacctgtgatcaaacctcgtttaacactctttttactaaccaaatcatatcacttccttattttgttgtaagtacaagttagatattaacaaaataattctgaattttccatatgtttaaaaaagatcatactaaaggtgtgtattaacattttgtttgatcatattgataccgggtaatgtacatggagaaaagaaattgaggggtgtttaggttgtatagtgatttaaaaggaaaaacagcaattgtgaccggctcttcaaaaggtataggcaaggcggttgcagaacggtttggaaaagaaaagatgaatgtggttgtcaattatcacagcgatcccggaggcgcacgggaagccgtcgacaatattcaagcagcgggcggaaacgcccttgcgatagaagctgacgtgtcttccgaagaggacgtgaaaaagctgattaattcagcagttgaacactttggttcacttgatgttatggtcaataattcaggatttaacggcgcgggcgcctttccgcacgaacttgagcttgatgagtggcagaaagtgatcgacgttaatttaaccggtgcgtttctctgcgcacgcgaagccttaaaatatatggcggaccgccgcatgaaaggaagcatactcaatatatccagcgttcatcagcaaattccgagaccgaaaaatgttcactactccgcttcaaaaggcggaatgaagctgttaacagaaacgcttgccctagactatgcggacaaaggaatccgcgtcaatgcgattgcgccgggaacgattgcgaccgaaagcaatgaagacttggagggaagccgcaagtcggaacagctgaaaaagatacccatgaacgaatttggcgagcctgaacaagtggcttccgcagcggcatggcttgtgtcgcaagaagccgcctatgtaacgggcgcgactttattcgttgacggcggcatgacgctgtatccatcacagctggaatagcaaaggccgttttttcagctcccgttctgccctttattgaatggcggaatgggggcttttttaattgtgttaccttttattttatagtaaaagaaacggagttttaatatataccgtgcatcgcgctgatcaggttgctatttacaactttcaataaaaggagattatgatgcaaaacaatatcgttcacattgccttcggcgagtctgccggcggcagtataaacatgatgctcaaacagtcgggaggaacccatgaaaagagtctgatcgttctgcctgaattattttccatcggaccgcttcaaaagctggaagccaaagaaggcagggtcaatcgttatgaatggttgaaaacatatctgaatgaccgatttcacgagtctggaaagagatacagccgttttgaagtggcggtttctgcattgtccggcattcctgagcaagcctctgtctttatatggacaggagatcatgcacacgaacagactggtctgaggtttgtacaccatatcctccgacaaatgaacctggctgttttccatttgaatacgacgaagttcttcccccatacccggagttctggtgaattgaatgatgaaaacctgagattcatttatgaacaaggggatcaggcggctgtgacagccgctgaaggacggcgccttgcagaggaatggacagcgctgtctcagcagacaagcgtgttgcgggtatgggaagacggtagaatcaaaagcgtgaaggaggatttttttgattcgttcataatcgaaaaactggctcagcttcaaaaaaaccgttcagccaacacctttatcaactgtctcagcttgatcggcgaagtcattggccatctggaggagaacatcggagatgaatttatcgagtaccgcattttagagctgatccgcaaaggtatttttgagatgaaaggcacaacaaaaggaatgagatattttaatgtcaggttaaaaaatgtcatgtaagttcaccagttaaatccaattatctcaattttcatgaaacgattgatagtatatttcgtatacataaggagaagaaaatgaaagagaggtagacaggatttggttcgtgaacagttaaaacaaaaagcgcaatccatcagtaaggttcccccacattatcagctcatgatcgaagattacggagagaagtacgaaaaagagaggcgggtttttttcgcttggcaggacattgaagagccggagcgggacatatcggtggagttagatcatcaaggccgcttaatcagtttgacaaaagagtatgaaccggtggtcgaggaagctcttcctgatgaaaggctgctgcaaatcgcccttcagtttacagaacagcattacccgaatgcgccttatgaatttgttttccatgaaaagaaggtaacagaacaattcgttcgttttacgtatgttcagactgtccttgatcttccgctgccgcagacgggcttttatgtccgggtcgccaagaacggagaggtgattgagtttcgctataacggcgggacgagctctttctccattccaaagcagatagctgataagcaatcggtaacagccgattatcttgaacatgttcaattcgaattggtggttgaaaaaatccgcaatgaactttatgaagggggagatgatctcccgcatcttatttacgaagcagacttgccgtttttcagctatcccgccgatatcacggaaaaacgccagatgaagcctgcggctgatgacgaggaagaagaagacacattgccgctccctgtgctgcctgaggctgaccgtcatgctgatatcgatgacatgatcggctttaccccttcgatgcgaaaaatccgcgaaaccgatttgggagagtcaattggaacagtgtggcgcctgggagacgaccctgagccgagagatcggagtatagccggctactttgaaacatggaaccaaaatacgttgaaaatcgtgaaagacaaaaactcggggaagctcaaaggaatcgcttcttttatcaaatcggaaggaccccctgtcttgagcggggaagactgcttgaaacgggcgctgcaatttttgtacaggctttatcccgacgctgatcggctttttcgaatgcatccggcggaaaatgacggggacaggtcaaacgcattttttcaatttgatcttcaatacaaaggggtgccgttaaggcttggctctgccaatatcagcatcaatcggacaaccggcagggtcgtcggttatcacggcccggaaatcgagccggaaacgctgatcgatctgagtccttcgccatccatttcagaggaggaagcgaaagccgtttttgcagcggcatttgatgtgaagctgcagtgggaaagggactacagtcgggaaaaggatgacttctacaggcttgtctaccggccggtatacccttactttatcgatgcccatgacggaaaggcgtttatgagcaaaaacatataataaacggcggctggctggggtggaaaagcccccggccgccgcctcttgtaagatcaaatatcgtcctcggctccagtggagatcggatggtctgggtagctgatccaatcgctccagctgccggcatacagcttcacattttcaaatccggcttcttttaagccgagtacattcgggcaggctgatacgcccgatccgcaatagacgacgatttcactgcccgggtccaaagcagcgtaatgctgtctgagctgttctttgcttttccataatccgccttcggttagattgcctttccaaaaaaagtttttagcgccgggaatatggccggcccgatgatcgagaggctcggtttccccggtgtatcttgaaggatcgcgcgcatcgatcagaatggagccttctctgccgattcgcttcagtacttctttggcatcgagcagttcgttttctctgagcgccggcttaaattcgcgctcgctaggacgaggatcctcggcgttcacctcgtagcccgctttgatccagttggacagtcccccatccatgatatagacgctgtcatgcccgagatagtgaagctgccaccaaaagcgcgctgcaaacatgccgccgctgtcatcataaacaacgacatctgtttgccggtcaatgccgatttttccaagcttcgcggccagaaggtcagggtcttgaagcgggtgtctgccgccgtgctcttccgggttgcgcgacagatcttcttttaaatcaatgaaaacggctccgggcacatggcctttcgtatacgcttttcggccttcgtccggttttgtcaaatgaaacctcacgtcgacaataactgtttggtccgttttttccattaatcgtttgtatacccattcagggctttttaatactgacaattcacgatccctccgttcccctttgttttttctcgggttctgataatagaagaatagctttctttcatgggcaatgtcaaagataaatcccgaaatcgtcatcacctaaatgaaacagaatatgataaaggtgacgacatcatgggggtgactaaaaatggcagtcgttcaggcttcttctaaagatatcagtcttttggcaagacttttgagagcggaggctgaaggcgagggcgtgcaaggtatgcttatggtcggaaatgtcggaatcaatcgcatcagggcaaactgttccgactttgtgggacttcgcaccattccgcaaatgatccatcagccgcatgcctttgaagccgtgacgcacggttatttctatcaaagggcgcgggaaagcgaaaggcgtttggcacgcagggcggtcaacggggagcggctttggccggcaaagttcagtttgtggtatttcagaccggcgggggcgtgtcccgcacagtggtacaatcagccgcatgtcggccgctttaaatcgcattgtttttacgagccgacagcggaagagtgtgagaatatctataatacgttctaacaaaaacatcccttttcaacggtttttgaaaagggatgtttttcgttcaaaataattctgccagtctttcgtaagactgcttcttatcttcaaaccggtagacgttagttaaaatcataaactcatctgtttgatatcgttcagaaagctcgagcagttttcttttgactgtttgaggagacccgatcaccatacggctgcggttttgggcaagcttctttttatcggcagctgtgtaagcggccgatttcgcctcttcaatgcttgggacaaggctgtccagccctttttcaacccggagaagccataaatcttggctcaagcagagctcctcggctttttcatcggactccgcacaaacgacgaaaacggcggccaatgattgggggcgtttaaagaaaggggaaggccgaaagctttcacggtatgattgaaaggcgttctttcctctcgcgggagagatgaaatggccgaatacgtatcccgctcccatgctaccggccaattttgcgctgttttctcccaggccaaaaagccacacctccgggggcgattccgtcaaaggggaggctttaattccgaagtaatcatgtccggaaggcacggaatcagtcagaaagctaaccaagtcttgtaactgtctcgggaattcgtgcaggcttttatgaaccccgtctgtcagcgccagcctcgttttagttgtgcctcccggagagcggccgatccccaggtcaattctcccgggataaagggcttcaagctgccgaaagttttcagccactttaaagggactgtattggggcagcagaacgccgcccgaaccgacgcgaatattcgccgtctttgccgcaatgtgtgcgatcatgatttctggagcggtgctggcaagcccccgtgtgctgtgatgctcggcaaaccaataccttttgtacccccattgatccgcaagttccgccagctctgcagaatgctttagagctgaatgcgcatccgagccttttgatataggaacctggtcaagaatgctgagctgcatcaattgtcaccggccttcctttcgttttcttgttcagtaagacaagcatatgaaaaacagcagatagggtcaaatcgaagagaatacgagagacaaaacatgattagtcaaaacatgacaccgttgaaacaaaaacgaaatataaatgtaatataaattggcgcctattgtcgaaaatagatggtataataacgtctgtacattagaaacggatatataaatcataggtcataagattcattttttaataatgttcaatcgaatttacataatgaaaaaacaagaatacataaaggaaagaggagtagaaagtgaagaaaaaggtttatgcttttggtttagcgtcgattctcggaacagctagtctatttaccccctttatgaacaacacggcatcggcagaaacatctcagcaaaaacaagaaattcagcaaaagcgttctgaagtgaattcaggcatcgagagcaagcggaaagaaattgccaagctgcaagacgagcagaaaaagcttgaaggtaaaatccaagagcttgataaaaaagcacttgaaacaagcaacaaaatcgaagacaaagaaaaagaaaacaaaaaaacgaaaaaagaagtggaagctctgaaaaaagaaatcaaagaaaccgaaaaacggattgaagagcgttcaaaagtgattaaaaatcgcgtgcgcagcctgcaggaaaacggcggatcccaaaactatttgaatgtccttctgggcgcacaaagcttcggagattttatcactcgtgcaactgctgtttcaacaattgttgatgcggacaaagacctgcttgacgagcaggagaaagataaaaacaagcttgaaaaagcaatgtctgatttaaatacaaaactggacgaaatccaaaaaacactagccgatttaaaaacgcttaaatcggatcttgataaacagctgaaagaacaggcaaacctttctaagcagctgcaaacgaagcaagcggcagcagaatcagagctgagcgatctgaaaaaagaagcgggctctctgacaaaagaagaagccgctcttgaacaaaagcttaaagaagaaagagctgaggcggctgcagcagcaaaagcgaaagaagaatctgcgacggctgaaaagtctgattcaggatcttcatcaagctcaaattcaggttcagtcagcaaatctgacggatcgtccaacagcggttcttcaagcagcaagaaaagcagcagcccgtcaagaaactactcttccggttctgttgtaagcagcaatggaaacgcgattgaagctgccatcagcacaggttcaagcattgtcggcagatctccgtacaaatggggaggcggacgttcacaagctgatatcgacaaccgccgcttcgactgctcatcattcgtacgctgggcttatgcatcagcaggcgtagagcttggattcggtgcgacaacaagcacgcttgtcggcaagggacgagctgtcagcgcgtctgaaatgaagcgcggagacttggtcttctttgacacatacaaaacgaacggccacgtgggcatttatcttggcaatggcacattcctgaacgataacagctcacgcggggtatccgtcgattctatgagcaacccgtactggaagaaagctttcaacggagttgtaagacgggtcgttgaataaaatattatactgagacaaacgccgttcccgatcgggagcggcgtttttattttacagcggcaagtcgcgctttttaaaaatgagaatgctgagtgcgaaggcggcaaaaccgactgcggcgagaacaagagacacttgagcgatgtcggtgcttccgttcacaatatcgcccggtctgaataaagagaaaaccgacaggctcctcagccattctgttttttcgcttaatttgcctagcaagtcgaagctgaagaataagaacgtgatgcctccggaaagtccgagggctcttttttcatcatttgaaatggccgaaaagaggaacgaaatgccgccgactgcaaagaagagcagaaagccaagcaggttcagaacgaggaaccttgatacattaaaatcgtaatcaccgcccagcatcaaatggtagccggccagtccggccgctgtcgtcacggccataatgatcaaaagacctgtcgttaagacggctgcttgggtgaaagccacttttccgcgcgttgtcggcgcagacagaatataggccattgacccttgatccacccgctttgccaaaagctttgtcgacagcatgacagagaagatcgataagatcacgataaagattaatccgtaatattctccagatataaaatcttcaagattcccaagtccgttttcaaacccaaaagcattgagaaagccttccggcatcgatttgatcattttctcaatatcctccgcattgcccgcgatgcttggataaatgcccagtatcaaaaggatataaaatgcggagcctaccccgtagctcatgattcctttcatgtttgttctcagcatttgtttatacagggagaggttcattgtgctgtcccctttctgttatagtagttcataaaaatttcttccaagctttgtgatgaagcatcaatgtgccgaatgtgatatttggcggtttctttaataaattgatcatggttccctaaaacggccactttgacgcggttgtccgtccgggactcaatttgcagacttgaattcatgaaggcgggaatgtcgcccgtgttttcaaatgtgacttcaaatacttttcgctgcatcgactgcagttcatgaatatccttgacggcaatgatgatgccgtcttttataatggctgctctgtcacaggttctttcgatttccggaaagctgtgggaagacattaaaaacgtcgttcctttcgctttttcttcgaggacgatttcaataaatactttttgcatcagcggatcgaggcctgatgtcggttcatcaagaataatcacttcggggctgtgcataaaggcggcgacaatcccgaccttttgcttcattccttttgacatttttctgatcggagtatgaacatcgaactggagccgttcaataagatcattgcgcttggctgtatcttttaagccgtgcatgtctgccatgaaatcgagaaattgttttcccgtcattccttcgataaatgcaatctctccggggagatagccgatatgccgttgaatatcgccctgctgcttcaaaacatccattccgtttactttaatgtcgccttgatcaggcttcataaaccccatgatatgtcggatggtcgtcgattttccggctccgttcggccctaaaaacccaaaaacttcacctttttgaacatgaaaagaaagatcaaagatacctttgccattggaaaacttcttcgtgagccgttcaactgtaagcatgtggaacctccgtaatgaaaataatgaaattttaataattataaattacataatttattttaagttcttatgaacttttttgtcaatgaaaattaatgaaatatatttatgttataatttcattaagaaagataagtaaggatggttatatgaacggatttgaaaaaagggctttgctgattaaggagaagatcaaaaagacggctttggatatgctcaaaacatgggagccaaagcgcatccggataaccgatatcgcaaaagaggcaaacgtttcgcaggtgacgatttataattactttggaagcaaagaagcgctcctgaaagaggtttttaaagattatatcgatcagtccatcagcgagtttgaagaatatatgaacaaagatatttctgttaaagaaaaaattgaattgatgattttgcaaaaaagggcagccaataatcaaaaattcgctttaacggtcatcaaagaggtgatgatcgaagacagtgaaattatggattatgtgaagcagcaatacgatgaaaaaatcattccccttatgctccaaatgattgaagaaggtcatcggacaggcgaaatctcttccaaaatcaccgcggaaagctttctcatctttatgaatatgatcattgaacattcaaaaacattaggtaaagcctttgaaaaaaacaggaagtttacagaggaaatgctgcacattttcttctatggcttgtgcggcagaccgtagtgataaatttgacatctctgtcatttctgtgaacgcttgaaacaatttccttgcttttccgtatataaggcagatacaaaaaacgaaaggatttactaaacgatgaagcactcctttttcttttttatgttcattgccttttttctcgtcactggtttttctgaagcaggcaaatccttttcgatcgagcgggctgatatacgcgcaacagtaaaagaaaacggcgatttaagtgtagaggaagtttacagatacgattttaaaggttcttttgaaggggcgacaagatcgttcagcgaagaaaccgcgagccgcctgaagaattttaaagcctatctccttcccgaccaccggagaaaaggcggtcaagccatcccgttaaagacaaagaaggaagacgggacttattttgcttattcggcatcaaaggatgaaacgaaaaatgtgatgtttcgctatgtgatcgaagatgccgcacaaaagtttgaagatacgtcgattttgatccattcattttaccaaaaggcaaataccgatttcggccgcgtaaagattgaagtgcgcctgcctgattcggtaaaggcacgggatattcatgcgtttttgcgtgaaaaaggaaacggaaagattacgaaggtgaacgattcatcggtcacctatgagacaggactctatcgcgcaggcacgggctccgagctgaggatatattttccgcaaagcgccttgaaggaggcggtccggcacccttcttaccagacaaaggatgagctgctgaaggaggagagagacgaggcgaaacgctacgctgagcgggatgaacgaattgccggcgctgaaaggatgattttgattttttcggggattgtggggttcatggtcatcatggctgtcatgctttcgtttttgaagaagagacgccgcgccatgctttcgtttgaagaactcgagtcctttgatcccgtgcttgtcgcatttctttacaaaaaaggccgtttcacagaccgcgatctcctggccggcctgctttcgctttatcagcggggattggtcactatgcagaaggtgcaggctgaagagaggtttctcgacgatcctaaggcgcctgatgacacatatgaatttgaattctccggaagcaaggcagatttgccaaagcctgatcagctcttaatcgaaaaactttttgagcagacgggcagcgatacctatatgttcaggctggattccctcagcgggccgactgaggaggaatgcaagcacaaggagcagctgggaaaatatgaacgaaagaggatcattcttcaaaacgtggttcaaaaatggacggaaagcgtcagacaagcgcctgaattcagggaactgtttcaagaaaaccgctggctgagaatgctgtcgctttcactgctttcagtccataccgggctcctgctctttattctgtatgcagatgtggtacatcaggccggattcatggcggcttgcgtcatatttggttttgcactgtcggcaggcattgttcttgcgaagtcaaagctgtatacgattctgtttttggccggattgtttttggcgtctgtttttaccgacagcgttcataccattttgtattacggcatatgcgtcgggctgtctattttattaattgccttcattccggccgtgaaagaaagcaggtatgcctccatctgccgaagatcgattctttcctggaggaaccatctgagaaaagaagatttgttctcagggagaagcctgtcacaaaacgaaaaaacgatgatctttgcaattgtgcttgaagtggaggatgaatctgccgtgtggctcaatcaatcagcaaacaggcttgattacgcttcccctgtactgggtatggctgcagccggctgtttgcattatccgttttacagctggcagctgccggattcgcagcagcacgccggtgcatatgatgcaggcggttccggagcgggcggaggcgacggggcaggagctttttaagttgaaaggggctgtcgcaacgacagccccttcagattatttcagttccccgcattcgctgttcagcagttttggttccgcgggtgacaggttgatgtccgtacgcttttgccaagccgaacaccggcatgttatggtaaaaagcctcatagcgcccttttggaaccgaatacgtttcatgatagatgccgacagcgcctgatgcggctgttttctgataaaaacggcgccaagccgccatatgtttatcaccctttgcatatgctgtcaaatcttcgaaagaacgccaatattgaataagacaaatcgtcctgaaattgatgaatgattccattgctaaaaagccgaggtttttgttttgataaagctcctttatcatagggggcatggcggtaaaaaccggccaccatttatgaacagcatgccacttgtttactctcatcccgatcacaaatacaacgacttcatcttcaggggcggccgtaaaaggcttgttgatgatcgttttacccattggtcccttcctttccattcagccgattgattgtggcctcacaccattcaattccggccgaggtggtgcgttttccataatccaacgtgaaaagccagtactctctgtcctttgaatgggagctgcacgaaagaattgactgctcgattgctttatatgcttcaagccgttcttcaagcttttgttggtactccttcactttcaaagcggttttctcccgcgattcttccttgctgaaaaacagcttcagcaaaaactcgtttttttctgaagcgatgtcattgatcggttcttcaagccagctctgcagcgctttttgaccttcagcggtaatcatgtactcttttctgtcctgctttttgtccgagagcgccggagaagccgcggcccagcctgcttccgttaattgacgcagtgcgggataaatttgcccgtagctgattttccaaaaatgattcaaactttggtcgatcattcgtttcatttcgtaacccgttcggtagccggccgtaatcaatccaagcagcgcgtaagtcgtgtgatttctttttgtcatacaaaccgcctttctatatctatttgatatatatcttttagatacatcatatcaaaggcgctgacttcgtgcaatcgctactattgttgtcgataatttgaccgggatgaaaatgtgataaaaaaatatcgaaaaaccgcgaaacttttctctgaatctttccgtatatatagttaagcaggttaaataatgattcattggtcttgtatttgtaaagatatgaatcacgctggcgtgataattggatctttcaaactcttattctcatccagcactgtgatctttaaggttatgattcaacggaggagtgaacagtttggctatttctttagagaaaggtcagcggattgatttaacaaaaggaaaagcggggctttcgaagattttagtcggtctcggctgggatccggtagcgtccggaagcggcggtttttttggaaagctgtttgggggaggaaccccgaatattgattgtgacgcatccgtgctgatgctggaaaacggaagagtcacagagaacaagaacgtcatttatttcggaaacttgaggagcagatgcggtagcatcgaacataccggagataatctgacaggcgaaggcagcggagatgatgaacaaatcattgtagatttgcaaaaagttccttcgcatattcataagcttgtctttgtcgtgaatatatacgattgcgtgaaacgaagccagcatttcggaatgatcgaaaatgcctttatacgcatcgtcaacatgaatgatcgcagtgagatggtcaagtacaatctgcgggacgattattctgggcggacaagcctgattgcgggcgaaatttaccgtgacggcgccgagtggaaattcaccgctgtcggagaaggcacaaacgatacgagcattacggaaatcgttaaacgctacgcctgacattcatataagaaatggggagatcaacatggcaatttcattagcaaaaggacaaaaaatcgatttaacaaaaacaaatcccggattgtcgaaagttgtcgtcggccttggctgggatgtcaatcaatatgacggcggtgctgattttgacctggatgctagcgtgttcctgctcaacgcagaaggcaagtgctcttctgaaaaggactttattttctataatcagaccgagggcgcaggcggagctgtcatacatacaggcgacaatcggacaggggaaggcgaaggagacgatgagcaggtaaaaatcaatttgaatgcagtgccggccgatattcaaaagatttcttttgtgattacgattcatgaagcggaggctcgccgccaaaatttcggacaggtgtcaaatgcttacgttcgcgtgatcaatgaagactcgaacgaagagttaatccgctatgatctgggtgaagatttctcgattgaaacagcgctgatcacgggagagctgtaccgccacggaggggaatggaagttctcagcgatcggctcaggctatcaaggcgggctggcgaggatcgccaccgatttcggcctgcaggtcggctgattttgaagatccggacagcaggcgccggatggcgtccgttggtccggctgacattttcttaaggaggtagtatcgatggcgattcaattatctaaaggacaaaggatcgatttaacgaaaacgaaccccggtttgacgaaagcgctgatcggtttaggctgggatacaaacaaatataccggcggcgccgattttgacttggacgcgtcggcttttcttgtcgatcagaacgatcgatgcatcaatgatcacgacttcgttttttacaacaacctcgagcatccaagcggcgccgtgattcatacgggcgacaaccggacaggagaaggtgaaggcgatgacgagcaaatcatcgtcgatttctcaaaaatccccgctcatgttgaaaagatcggcatcacggtgacgattcacgaggcggaaagccgcagccagaactttggacaagtctcaaatgcgtttgtccggctcgtagatgaatcaacaaatgaagagctgcttcgctttgacttgggagaggatttttcaattgagacagcggttgttgtttgcgaattgtaccgtcacggaggagattggaaattcaatgccatcggcagcgggttttccggcggattggcatcgctttgccgcaactacggcctgcaagtctagttttgccggctgagtcacctttgcgtgattcagtcttgctttttcatcattaggaggtaacgaaagtggatttatttcatcatattatgtcaatttacgcctcatttttcgattgggaaatgtgggtggaagtattaacggaccctgtttcctgggggctgatcggctcgctggtcgtgctggaggggcttttatctgcggataacgccctcgttctcgccgtcatggtgaagcaccttccggaaaaacaacgcaaaaaagcgttgacatacggtttaatcggggcctacttctttagatttctattcattggactcggtatgatcctgattaaattctggtggatcaaactgctcggagccgcatatctggcatggctcgtcatcaagcacttcttcatcggtgagggcgatgatgaagcaaacgccatcaaaaaagacagctggatggtacgcgttttcggggtcttctgggcgactgtcatttcggtagagctcatggaccttgcattttcggtcgacagcatcctggcggcatttgccgtatctgaaaaggtatgggtgcttctgatcggcggcatgctcggcatcttgatgatgagaaccgttgcgaaattcttcttgacgctgattgacaaagtgcctgaacttgaaacaacggcctttgttttaatcggaatcatcgcactgaaaatggctgcgagtgtatggcatattgaaatgccgcacagcgtcttctttatcattctgattattgcttttgccgcaacatttatcattcactatatgaacaagcaaaaagctgtaaaagagcaaacggcggcttcaaaggaagaataacaaactgcaaaacataaaggggggagtagatctgctccgccctttttttacatcaaaggggtgtatgattcctattcaaagaaggtgacccatgtgcaatactttgattttttatccgcctctcaaaaagaagatgtctttttcaaactgccgggtacggttacaaaggactctccgaagcgcattctcgagtatgcgcttggagctgcgctctatgttccggggaaccgaaaagatatagcagatgtcatcatcaataacaagtatccagaactgtgctcggtcgttttttgccttgaagattcgatcggcgattgtgaggttctacaggctgaaaacaatcttgtcagtcaggccgatatgatttatcaggcgcaaaaactgcagaacatcaacagcgatgtgctgccgctgatgtttatccgagtgcgggaacctgagcagatgctcgaattgggcaacaagctcggccgcgcgcttcacttgtttgccggattcgtatttccgaagttttcgatgttgaatgcagagcactaccttgatactttaacgaagctgtcgcaagaatccggcattgtgctatacggaatgccgatctttgagacacctgatctgctggcgatggaaacgagggcaaaggcgctgcaggaattaaaatcaacgcttggcttttatcaggatatcattctgaatatcagaatcggggcgactgatttgtgcggtctctacggcttaagaagaaaaccggaaacgccgatttacgacattttggtcatctctgatttcatcaaagatatcgtcaattatttcggcttgcaattcgtgatttcggggcctgtctgggagtactttggagatgcttcgcgaacggttccgccttttgcgccgaattgggctgaggcgggggaatcttcgcttgtgatcaatcggtatatggacggattgatcaatgaaacgcttcttgacctggccaacggcattcacggaaaaagcgtgattcatccgtcacaaataaaagcggtccaaagcctgcatgttatatcaatggaggattatctggatgccttaagcatcgtcgaaagtgccgacggcacccgcggcgttgtaaaaagttctttctcaaataaaatgatcgaaatcaagccgtaccttagctgggccaaaaaaatattattaaaggctgaaatctacggggtatatcatgaaaaccgcagctatacggatatacttagagcgtccaaaccgttttcaaaccttggatcgttcgggagttagtctgggacgggtgattggaaatgggcaaaacgtttaaaagatcagtgcttctactgtaaaagagccgcactaccaccatgatctcaaaggcagacattgtgaatttctcaggagaaaacaaatgaaattttaggatgaacagccatgatgaaaatagtcgatctcacgagcagcgagattctcagttcccagcaggcatgtgaagagtgggggattgattcgtctacgctccgaaagagagcgcatgattttcctgcgggaacaatcagaaagttcgggacaacctatgccgtgacaagagcgggcatgtgtgccgtatttggacgtaagagcgacactgactcagaagaaaggggagacggctgagcgctatgaatcaagagattaatattcaaaacgccctggtcaatgatgatgaatggaagcagatcatcaagaagccgctcccggagagaaccccgtatgaaaaaaacagtcatttgacgataagccgtctggcgggacggattcttggaactccgcacgatgaaacggattactacatatatctccatgagctgtatgcgtccggtgatgtgcatgtgttaagcgagacgcttgataagaccatttctccggaaaggtttcaggccatacagcggatccatatggtgaaccagaaagaaaaaggactttccgtcaatcggtttgccgcttttcttgacggggagcagctgattcctaagcaccctgatcccgctatgcaccggcatttaaggaaggcgcttatcgaagtgctgcagctgtttcagtcctttcatgaaaaaggattgaacgatccggattttcgccgggtcctccttgaccttgtcaaatggatggtcaaccatttggagaagtggctgaaaggggccgactgcgaaacggcgatgccgaaagtggtttggtacggggacaccaccaaaagccaacggtattttttatactatttgatgcttgtcggatgcgatgtgctgctgtttcatccggagggaaaagacgaatttcgccagcttgatccagagcaaaagctttcttttgtcttcacatacccggacacgtctgcattagagccgttcccgactgaaaagccccagcgcaaagcaacggtggcgtaccgttccgcgaaggagctggatactgtcctgcacaatgaggattcgctaatgtacaaaccttggcagttcagggagcatactccggcctctgtgactttgaagacaacatatgatgaactgtttttaattgcgaaggaacgagcctttatcagacctaattttcaggcgtctaaatcaacggttaacattccgaatttattcgcgatggtcatgggcgtctccagcaatgaaaaagagtactgggaccgtctgcagacactgacggagtataaggagtcgcatacgatccggcgcttcccgtttacaaaggaagagacgtcgaattatcaattccattacagcgatgcgcttgatcaaacggggatgatcgatccaggccgtttaatggagagcaatatatggcgctacaagcatctgcgtgagggagtacagcgaggcattgcccaagcggtttccaggatgtgcaaaagcccgaagatgctggctttgaacaatgaaaagacagccgatgtacagctgtatttgtttacccaagcggtacagcttccggcagcgctattgaatatgattcagacatttgactattcacagaccgtgccgaagctgatcttgtatcacacggaacagacggggacactcacccggtcggacgcggccgccttgcttttgttaaatgaaatcggcattgacattatcatctataatccgccgggccataagtgtattgaccactatatcgacaggcagcactttgatacccattggcttgatgaaatgtccttcaaccaggagtttaaagagccgtcaatcgtccggaagttcatcaataaaatcttttaaggagggggccattctgatggcaaatccaaatgaaacaagcatcgtcaatattagcaaagaggaagagatcacggttgaaaaagcggaggacatccgtgcgaaactccgccaggatccggatgtgcaagctctggcccgacaaattgacgtgaaaaaccaagtggagcttttagaattcggtaaggagcccgctcttgaaatatccaagttctctgaccgcattctttccatgatgagaacgaacagtgtgacagattcaggcgcgatgttgacgcagctcggaaaaatcatggaccgctttgacaagaatgactttgaagaacaaaaaggcttgctctctaaattatttaagcgcggcaacagcatgatcgagaaaatatttaaaaaatatcaaacgctcggcggtgaaatcgaaaaaatcaatgtcgaaatttcaaaatataaagatgaaatgacaaaatcgaccgtgacgcttgatgaaatgtatgaaagcaaccttaaatactatgtggagctggaaaaatacgtcgtagccggccagatgaaaatagaagaattgcagcggctcatccccgaatatgaagcgaaagcggccagcggaaaccagatggcgcagatggagcttgatacgcttcgaaacggcattcaagcgctggaagaacgggtgtatgatctcgatatggcgcggatggtcgcaattcaaacggcgccgcaaatccgcctgctccagcgcggcaacacaaagctgatcggaaaaatcaactcggcattcatcattacgattccgattttcaaaaacggcatcatccaggccgttaccgccaagcgccaaaaacttgtcgccgattcaatgagcgaactcgaccgccgcaccaacgaaatgctgaagcgcaacgcggaaaatatttcaagccagtccgtcgaaatcgccagaatgtccggaagaccgagcatcgatattgaaacgatcgaacaatcttggaatacgattgtcaaaggcatgcaggagacgaagcagattgaagatgagaacaaacgcctgcgcgaagaaggggcaaaacgcatattggaacttcaggacaatatgaaaaaagccgctttaaacggttaaaaaggataaagaagaagccgcccccagatcagctggcggcggcttcaaattacaaaaaatcaccgccatgataggcggttttatatgttatgctagagaaagagaatcgcatggtaaaaaatatataaacatgaaagaggtggaagtatatggccgctttatggctggcattcggcagcggtttcctgtcgtttatttctccttgctgcctgcctttgtatccatcatttatttcctacatcaccgggatttcggtcggcgatttgaaaaaccggcatgcaaagcatatcaaacaatcggtgatgattcacgcagcggcttttttggccggtttttctgtgattttttacatattgggtttctctgccagctcggttggtctgctgtttttgcaataccataacttaatccgcatgctgggcgggatatttttcgtcgtcatgggactgttcttactcggcgttttccggccggcttttatgatgaaggagcggcgcttttcgattagaaagggaaaaataggcctgctgaattcaatgctggtcggaatgatttttgcggcgggctggacgccgtgcatcgggcctatattcggaacgatcgcatacgcaaattttcagaaccctgattttgggagcgcattcatgatgatcaccgcatattctttaggctttgccattccttttttgctcatggcgttttttatcggaaacatcaggccgcttatgaaatattcgaatatgctcatgaagatcggaggcgcgctgatgatcgtcatcggcatcctgctttatacggacaacatgatatggattaacatctggtattcgaatttgacgaatctcttttgaaaaacttccgcatgctgcattatgtgagtaagattgtgaaaaacagcaaaatcgcgttaaataaactatggatgatcatcgcaggtataatcgatcgtgttttttcgtatgtccaggcaaacacgagccctgttccaaagttaacggccagggtgttgtatgtggggatatgagcgatcataaagagggcgctgcttgcaacaagtgcccatacaaccccgaattcagcgcggaaccagcggtaaagaaaaccgcggtaaaacaattcttcgtagatgggagaaacgatgcaggcagaagcgaaagacattgcaatgctcaaccatgaaggatcggcagtgatcgtttttgtttttgtattttcgtagcctgtgccgaaccaaatcaggatttccataacggcaaacgtcatcacgattaaaaaaaccgtccatcccgctatttgaatcaagtatgcaggggcgaaccgggagattccgatttcccgccaagacagacggtccggctttaaggcgatatagtacaagcttagaataaaaacggccgccattgcgatactcatcaacatggctgaaagcatgccttcgcctaaaagcagatccaaagcattctttaataaatattcaatgaaaatcggcacggctgcaaatgcgatcaaaaacaagcagaccagctgctttttgttccaaggatttttccattccatcacaaaaccctcctgtttttaagataaaatcattttaaatggtgacgtaacgtaatcttcaagcaatattttaggagggagatatggtgaaagaggaactgacaaccgggcgggtggcgaagatgatggggatatccgtaaggacgctccgctactacgatcaaatcggtttattaaaaccgggctctacactgccgaatgggcgaaggcaatattcgaaggaagatttgttagagctcgaaaaaattatgatcttgaaatctgctcaattttcattggagcatatcaagacgttaatgaatcaattggatacaattagtatcatcgaaatgcataaaaggcgcctgaactcggagatcgaacagctgacgaagagcctggagcatacaaatactttgctgaacatgtatcaaatcgaaggaagcttgagctgggaagaccttctcaagctcgtcagacagccccggcataaaccatggaaggaatcattctctgaagaggaggctgagattttagcagaaaggcttccgaaggcggagagtgacgatttcatcacaaagcaatggctctctatcatcaagcggattaagctgtgtttaaaacaagaggtgccgcctgaatctgaatggggaaagcaaattgcggaggatatcatatgcctgtctgatcattcgtttaagggacatgaggatttagccgatcgattctgggaggttcgcaagtctgaggagccaaacgggctttatccgcttgacagcgggattatggaatttgcggagagagcgattgaatctgcatttcatgattcaggaggatcagggtgatgatgagcatccaattgtcatgatccgggccggatgaccaaaagatcaaacaggatatgccgcatagaaaaccgcccgaaaagaatcgagcggctaccccttaaattcggattgatttctcctcggctttccactgttttttccatccggcctgagcaaacaaaagcagaccgagcgctaaaaatgcaataacggtaaaggttaggaacccgcttgaatacgtacctgtaatttgcttcagcgttccgaggatattcggaaggaagaatccgccgattccccccgcagcgccgacgatccccgtcaccatcccgatctcttgttgaaatcgctgcggtacaagctggaatatcgcgccgttccccattccgaggcagcccatgccgataaataatgcggctgtgacaacgcctagagacgggagcatactgaccgagaacatgcacagagccactccgataaagaggaattgaagcagacgtacgccgccgattttatcggcaatcaatccgccgacagggcggaggcagcttccggatgcaacgacaagcgtgacaaattcgccggctcttaccgccggaacggcatactgggatgcaaaaaagtagcttaaaaagttggacaggccgacaaaacccccgaatgtcacgctgtagagaaggcaaaaataccaagtgtccctttctttgaaaacggcaaaatagtctttgagcggtttaggagccggctgattcggaggttctttagccataaggaaatagctgaataacacgagggttaaaggaatcagcgccagtcccatgacgccgttccagcccacttgctccgcaaggcgagggccgaatagcgtagcaagcagtgttccgctgtttcccgccccggcgatccccatggcaagaccttgcaagtgcggcggataccagcggctcgccataggaagggaagcggaaaagcttgcgcctgccacaccgagtaaaattccgatgatatacagctcggcgaccgatgaaccgaactgccatccccataacaacggaatcatcgtcaccagcattccgccaacagccgtctttttcggtccgaaacggtcggttaaaatgccgagcgcaatccggaaaaacgatccggccaaagtaggtatggcgacaatcaatccgacctgtgaaggcgataaatcaaaatcagccgtaacataaacaccaagcgcccccagcaacacccaaatcataaagctgacatcgaaatataaaaaagatgacaacaaggaaggcgcgtgtccgctcttcctcaaatccgccaatttcaattgcaacactccccatccgatagattctagaatttatcatgacaaaatcgaatagggttggcagtatttttgtaagctttactaacaaactaaaagattgaatatttaaaatgttagtttggacagcactatagcaggcgataattgaatcatgctgaagaatagtggtgttatgagcgctgaaaatgggaaaccttatattgatataggcccgatgcacttgcagataaaaccgtcttttgcaacgcgtttatcaatttttctttagacataaggcatatttttaccagaaaatgtacaaatttaaggaagaaatacgtggagacacaaaatagacataaataaaaatgtatatcacttgaaaaagtatgtgaagtattgcacaatatgaatgtgaagaatttcacaaacagcttagtttaaaacaaacggcaaaggaatgatgagtcatgagaaaccaaaaagtcaatcgtacagttttgatcggtgcgggttttgttggaagcagctatgcatttacgttaattaaccaaggtatcacagacgaacttgtgatcattgatttaaataaagacaaagcaatgggcgatgttatggatctcaaccacggtaaagcatttgctccgcatcctgtgaaaacatggtacggcacatatgatgactgcaaagaagctgatattgtctgcgtatgcgccggagcgaaccaaaagccgggtgaaacccgccttgatctagtcgaaaaaaacttgaaaatttttaaaggaatcatcggagaagtcatggccagcggttttgacggcatcttcctcgtcgctacaaaccctgtcgacatcttgacttatgcgacttggaaattcagcggccttccgaaagaacgcgtcatcggaagcggcacaacgcttgacactgcccgtttccgctacttgctcagcgagtatttcggtgtcgctgcccacaatgcgcacggctatatcattggtgaacacggagatacggagctacctgtctggagccatgcgaatatcggcggagttcccgtcagcgacttgctgaaaagaaatgagaaatacaaagcggaagatctagatgaactgtttgacaatgtaaaaaacgccgcttaccacattattgagaaaaaaggcgcgacatactacggagttgccatgagcctcgcacgtattacgaaagcgatttatcgaaatgaagaagcaattttgaccgtgagcgctcatcttgatggtgaatttggagaaaatgatgtttatatcggagttccggcggttgtcggccgatgcggagcgagggaaattgttgagctcgatctgaacgaaaaggaaaaacaacaattcaagcatagcgcaggtgtgttaaaagcaattttaaaaccgcattttgaactgcaggcgtaactgaacaccatgaagatactaacatcatgaagattgcgagatgatgaaaatgtggcagcagatatacgatccgtttggaaatctgtttatcagcgcttttgccgccatactgccgattcttttctttcttcttgcattgaccgtgttgaagatgaaaggaatcattgcgtcatttttgacgctggcggtcagctttattgtagcggtgttcttctttcacatgccggctgcgaaagctgtctccgccgttttacttggaattgctaacggcctttggccgatcggatatattgtcctgatggctgtatggctttacaaaatttctgtcaaaaccggaaagtttaaagtgatcagagcgagcattgccggaatttcgtccgaccagcggcttcagctattgctgatcgggttcagttttaacgcctttttggaaggtgcggcaggcttcggtgtgccgattgcgatcagcgccgttcttcttgtcgagcttggttttaaacctttgaaagcggcatccctatgtttaatagcgaatgcggcatccggagcctttggagccatcggaattccggttatcacaggagcgcagatgggaggcttaacaccggttgagctttccagaacgctcgctttgatgctgccggtcatcgctttctttgtcccgttcctgctcgttttcatattggacgggtttaaaggaataagggaaacgctgccggctcttctcgtattaagcggaagctatacggcggtgcagactttaacaatgattagtttggggccggagcttgccgacattttggccgctttaatcagcatgggagcgctggcgctgtttttgaaaaagtggcagccgcgccacatatacagggaaaccgggaatgaacatgtgcccgctgaaaaatatcgtgcagcagacattatgaacgcttggtcaccgttttatattttgaccgccgtcattgcggtgtggagcctgcccggttttaaggggctttttcaggaaggcggattcctgaagcaaacgacaattttattcaacatgccttttcttcaccgagaagtgctgaaaacgccgccgatatctccggaacaggcaccgcttgatgctgtgatgaagcttgacttcatttcagcgacgggtacggcgatcctgatcgcggtgatcatcacgattgtgctgagccgaaacatcagtttccgcggaggactttccagtctgaaagagacggtcaaggaactgtggcttcccgttctcaccatttgctttgtgatgggttttgcaaacttggccaattatgccggattgagttcaaccatcggactggcgctcgccaaagcgggggatatctttccgttcgtcagtcccgtattgggctggatcggtgtctttatcacaggttcagtcgtcagcaacaacgcattattcggccacctgcaagcagtcaccggagcgcaaatcgggacaagttcggctttgctgcttgccgcaaataccgcgggaggcgtgatggccaagctgatctcaccgcagtcgattgcgattgcaacagccgcggttaaagagacagggcaggaatcaaagcttttcagccaaaccgttaaatacagcctggttctgcttttcatcatttgcatttggacgtttgcgctatcaaagcttggcatataaagaagagccttttcccattgcgggaaaaggctttttaagctgcttgttctatcatgtcctctttttgaatacattgtacaagttatccgcggaagggggacgcgatatgttgaacatcttcctgagctatgtgtttttgggtttgtcattggccgcaccagtcggacctgtgaatgccgcgcagatcgacagaggcatgaaaggcggattctttcatgcctggctgtttggccttggcgctgtaacggcggatgtcctatatatggctttaatctactttggagttgcgcaatttttgacagcgccattcttaaaaacgtttttatggctgtttggtttttttgttttgacctatacggggatcgagagcctggtcaaggcgaaggaagtatcgctgatgagaggtgcgggagagaaagggtcataccgcaaatcttttttgtcggggctggtgatctccctttcaaacccgctgagcatcatgttctggctcggcatttacggaagcattttggcgaaaacggtagaggcgtacaaatcataccagctgctgatctgcagttcaggcattttaatcggactttttctgtgggacttggccatgtcttttctagccgggacattcagaacatttttaagcccgcggatgatccagggaacgacttggctcgcgggcatcagtctgatcgtatttggatgctacttcggctatcagggaattctcgaactgctgcaggcggggcgctgatcatgtctgcccgtttttctcttcctgatccgcccacttttttttcatgagcatcgtcacagcagcaataacggcaagaaagagaaggctcacaaaaaaaccgggtctgctgtttttttcaaataacgtacccgaaacggcgaacaaaatcaggacgagcgctgtgacaatttggacattccctttcattttcggttttgtgagctttttgctggaaagcaggataaacatccagttatagagcagcatcaagctggcggccgtcgtcatgtgttcataaagctgcttcggcaaaatgagcgacaagacgatggaagcagcgagaacgagcactgtcaggccgagtgccggccacgatactttcgccttttcttttttggcaaagcaggccggtgcatccccgtttttcgccattgttcccatcagtgtggtgacggcgaacagggaagcggtcagcgttgaaaaaccggcaataataaaaatgccgttgaaaatatccatgatcaaatcgagatgaaagtcttttaatgacgtaataaacgggctgttctgttcggtgaatgttccgcgtggtacaaggagcatggccagcccgatcgatacgacgtagaccacagcaagggttatgagcatcaggctgcctgactttgatgaatccttcgggtcttttaagtgaatcgccatcagacccatgacttcgattcctccataagcgtaaaatgtataaatcaaccccgtccacaatcccataaagccgaaaggaaacaattcgtgaacccggtcagggaactgcacttcaggcgtttttccaggcagcagcccgcacaatgccaagacagcgatgatgataaacattaaaatggccgccgttttcaacacggccaatatgttttccgttttttcaaagctgctgcgccctgtgaaaatgacgatcaatccgagaatcgcataaatagaggcgaacacccacagcggaatctcgttaaaccaatggcgcgtaaacagggaaatcgctgtcaactggctcccgatgatcagcatttccgatgaccagtagacccagccattgctaaaccccgcccaattgccgaaggcctctctggcgtaagaacaaaaagacccttcaacaggatgatctgccgttaatttcgccagctgctgaaaaacaagaaaagtgccaagggcagcaagaagaaaggcggctaatacggaaaagccgcttttcttaatcgcgatgcttgagccgaggaaaaaccccgttccaattgtgcagccgaccccgatcatggacagctgccaccattttaaatctccttttttcgcttgtcgtttcatcgtttcaacccctctaatcttcttgttattttgccagggggctccgtttttattagcaaagggggaggttctttgcgcacctcaatattcactttgaaatgagacatatgctatagttaaagacataatcattacggttcattcagtcaaaaggaggagtgacggatgactttacaagaaaaaatcatgcaggaactgaatgtaaagccttctatcgaaccgaaacaggaaattgaaaaaagggtcggttttttaaaaagctatttgaaaaaaacgggtgccaaaggctttgttttaggcatcagcggaggacaggactccacattggcgggcaggctggcccagctggctgttgaagaattgagggaagaaggcattcaggcggaatttattgcggtccgcttgccttacggtgttcagcaggatgaagatgacgcccagctggcgctgaaatttatccagccggacaagtcttttgcttttgacattgcttcaactgtaggttcatttgctgctcaatatcagtcagtcacgggagaggcgcttgccgattttcacaaaggcaatgtaaaagcgagagtccggatgatcacccaatatgcgatcggaggtcaaaatcagctgctggtaattgggacagatcatgctgcagaagctgttaccggattttttacgaaatacggagacgggggcgcagaccttttgccgcttacaggactgacaaagcgccagggcagaagcctgctggaagagctgggagcgccggagcggctttatacgaagtccccgaccgccgatttgcttgatgaaaaacctcagcaatccgatgaaacagagctcggcctgacatatgataacatcgacgactaccttgaaggaaaagccgtctccagcgaggtggcagaggccatcgaaaaacgctacaaggcatccgagcacaaacgccaagtccctgcttcaatgtttgacgactggtggaaataagctaaaaagaggctgaagtcagcctctttttttattaacaggcaccctatatcattacagatggaattgtcatatacttaagatatttgattcctttatgcagggaggagtagaagctggaaatgaatgccgcaataagagataagaatattgtgctgatcgggtttatgggcgtcggaaaaacaaccatcggccagcttgtgtcaaagaaattaggccgtgactttatcgatatcgaccacgagatcgaaaaagactttcaaatgaccattccggagatgtttcagcaaaaaggggaagcgtttttcagacagacggaaaaagaatatatttttcagatgtgcgaacatacaatgggcaacatcgtatccttagggggcggcgcttttcagcaggaggaaatcagaaagaagtgcctcgaacactgctttgtcatctttcttgatttaagatgggagaattggaagcagcggatggatctcttgattgaaaacaggccggttcttcataaccgcacaattgaagaaatgaaacagctgttcaatgaaagaaagagcatttatgcatttcaccatttaaaagtggaaaccgataaccggtctgccgaagaaacggccgactatattgtggagatgctaaagcttggtcaatcttaaacaaacgtttaattaagctaaatataccggaataagcaaagagccaatggtctgtctgatcattggctctttccgttatccgcagatgaatgccggatttttcggccttgtttgaccgtttgatacagtataggggatcaggatgggcatcacgttacaccccgccaccaatttttccctggataaggtttttccgcccctaaggctttaaaaaagtcgcttattgccggcccggacactataatgtaaataatagaaacgatagactggcggtgtacttatcatgaaacagcgaattgaagaagaactgaaaaacattgaagcaacatatggcgtcaaaatcctctatgccgttgaatctggcagcagggcatggggctttccttcacaggacagcgattacgacgtcagatttatttatgtccatcaaaaagactggtatctgtcaattgatgcaaagcgcgatgtgattgaactgccgattgacgattctctcgatatcagcggctgggagctgacaaaagcgttaaggctgttccggaaatcaaatcctccgcttctcgaatggctctcttcgggaaccgtttattatgaagcctattcgctggcagaaaaaatgaggcggctcaaaagccgcgccttttctccagtctcctgtatgtaccattatctcaatatggcgtcgggaaatttccgagactacctgacgcgtgaagaagtgaaaatcaaaaaatatttttatgtactccgcccgattctggcttgccagtggatcgaaagccgccggacggttcctccgattgaatttcaggttttgcttgacgaacttacggaagacggaccgctgaaaacagaaatccatcagctgcttgaaaggaaaaagaaaggggaggagttcaatcttgaacctcaaaaccccattctccacgaatttattgagcgtgaacttgagcggcttcagacagttgccaaagcatataaaacggatcatgaagatctgacgcaggagcttgaccgtctgtttagagaaacgctagacgaggtgtgggcataaaatgatattccctttaagtattcttaaagggttttttctttgtatccatagggaaatggtttagtataacagaaagcgttttcagaaaaagcggggcggaacggcagcaaggccattcgcgaaaaacgcattctgttctttaccgaagtttcttcctgattctattgttgtataccatccaagttttaggaagaaagtttctgaaaaaattccaccagatgtaaaacattgtggaaaaaccacaaaaatcgtcagcttttttgttttttcgaaatattgtgaatcgacccttggctcttataaaattaagaatataaagaaatatttcatgagatggcggggtgtgataatggaagtgataacaagagactttttcctattcttatctaaaagcagcatcctgaatcgcctggcgagaaattgggggagttccgtcgcgaccggaaaaattatcggaggaaaagattttgaagcttcaattccgattattaaggggcttaacgaacaagggctgactgtgacagtcgatcacttgggcgaatttgtgaacagcagggaagtcgcaagggagcgcacgcaggaatgcattcgggccattcagctgattgctcaggaacagcttaattcacatgtttcattaaagatgacgtcattgggactcgatattgaccttgaccttgtcagggataatatgaacagtattctggaatgtgccgagcagcaccaagtgatggtcacaatcgatatggaggatgaagtgcgctgccaaaagacgcttgacctctttaaggagttcaggcagaaatacgagtatgtcagcaccgtcctgcaggcttatttgtaccggaccgaacaggatttggaggagctcaattcattaaatccgtttttccgtcttgtgaagggagcttataaagaatcgccgaaagtggctttccctgacaaaaaggatgtggatgagaattacaaaaagctcattaaaaagcagctgctgagcggccattacacagctatcgcaactcatgacgacaagatgattgatttcgccaaagaaattgcgaatgagcatcaaatcggcaaagaccgcttcgaatttcaaatgctgtacgggatgcgcagcaaaactcagctggaactggtgaaggaaggctacaatatgcgcgtgtatcttccttacggagacgactggtacggatactttatgagacggcttgctgagcggcctgccaacatcgcttttgcgtttaaaggcatgacgaagaaataaaacgataaaaaggggagattagcatgacaacaccttacaaacacgaaccatttacaaatttcgggatcgaagaaaaccggaaggcattcgaaaaagctctggaaacggtaaataacgaatggctgggtcagtcctatcctcttgttatcgatggagaaaggtatgaaacggaaaacaagatcgtatcgatcaaccctgcaaacaaagaagaagttgtaggcacggtatccaaggctactcaggatcatgcggaaaaggccattcaggcggctgcgaaagcgtttgaaacttggagatacacagatcctgaagaaagagcggctgttttattccgcgcggctgccaaagtgcgccgcaaaaagcatgagttctctgcgcttttagtcaaagaagcaggaaaaccttggaatgaagcggatgcggatacggcagaagcgatcgattttatggaatactatgcgcggcaaatgattgagcttgcgaaaggaaagccggttaacagccgtgaaggcgaacgaaatcaatatgtgtacacaccgactggtgttacggttgttattccgccttggaacttcctgttcgcgatcatggccggaacgacagttgcgccgatcgtgacaggaaacacagttgtactgaagcctgcaagcgcagcgcctgtcattgccgccaagtttgttgaagtgcttgaagaaagcggacttccaaaaggagtagtcaacttcgtccctggaagcggagctgaagtcggggattatttggtggaccatccgaaaacaagcatcattacgtttaccggttcaagggaagtcggaacgcgcatttttgagcgtgcagcgaaggttcagcctggtcagacccacttaaaacaagtgatcgctgagatgggcggaaaagatacggtcgtcgttgatgaagactgtgatattgaattggctgcacaatcaattttcacatctgccttcggctttgcaggccaaaaatgttcagcaggttcacgggctgtcgtgcatgaaaaggtatatgacgaagtattgaagcgcgtgattgaaattacggagtccaagaaagtcggagagcccgacagcgcggacgtttacatgggacctgtcatcgatcaggcatcctttaacaaaatcatggactatatcgaaatcggaaaagaagaaggccgcttagtcagcggaggaaaaggcgatgattcaaaaggctacttcatcgaaccgacgatctttgccgatttagatccgaaagcccggttaatgcaggaagaaattttcggacctgttgttgctttctcaaaagtaagcagctttgatgaggcgctggaagttgccaacaacaccgaatacggcctgacaggcgcggtcattactaaaaacagcgatcatatcaacagggcaaaacaagaattccatgtcggaaatctgtatttcaaccgcaactgtacaggggcgatcgtcggctaccatccgtttggcggtttcaaaatgtcgggaaccgactctaaagcgggcggacctgattatcttgcgcttcacatgcaggcgaaaacgatcagcgaaatgttttaaggtgtaagaaaaggggttaaacagggggacgaaggcagcctataataggctgccttcaaaaaaagagaaattagtctaaaaatttagataaacggcatcttggggggagattcttattcagaacgtacaattgatcatttccatcgtgatttacatggtagggatgctttatattgggtattacgcttacaaacggacagcaaacctctcagactatatgcttggcggacgaacgctcgggcctgctgtcacggcgctcagcgccggcgcatcagacatgagcggctggcttttgatggggctgccgggcgccatgtttgcaacaggcctgagcggttcgtggattgtcatcggactcgtactcggcgcttgggcgaactggatatttgtagcgccgcgtctaaggtcatacaccgaagtagcgggcaattcaatcactatccctgcatttttagaaaaccgttttcatgacaaatcaaagatcctgcgaatattttccggagtcgtcattattaccttttttacgttttatgtatcatctggaatggtttccgggggcgttttatttaacagcatatttaatttggattaccatgcagggctgtggatcatttcaggcgttgtcgtggcctacacgcttttcggcgggtttttggcagtcagctggacggactttgtccaaggcatcattatgtttgtcgcgttaattcttgttccgattgtgacggtcattcagacgggaggacctggagaagccttcagcgagatccagtcgatcgatccaaacctcctcaatatttttaaaggtacgagcgtcctcggcatcatctccttgttctcatggggcctcggctattttggacagcctcatattatcgtgcgctttatggcgatatcctccatcaaggaaacgaagaaagcgcgctggatcggcatgggttggatgatcttttcaagtgcgggcgcactgctgaccggattgctcggtattgcgtattactcgaagaacgggcttcacttggatgatccggagaccatcttcattcaattgggtaacatcctgtttcaccctctaatcacaggatttttaatctcggcgattttggcagcggttatgagtacaatttcctcccagctgcttgtgacatcaagttctctaactgaagatttatacaaaacactatttaagcgctctgcatctgataaagaactcgtctttttcggacggctttcggttttggcggtttccattgtcggactctgtctcgcctggacaaaaaacaatacgattctcggtcttgtcagctatgcttgggcgggtttcggagcgtcgttcggccccgtggtcatcttaagtttgttttggaagaggatgacaaaatggggggcgcttgccggaatggttgccggagcgcttaccgtcaacatttgggcggaagccgggctttccgatgttctttatgaaatgattccgggctttgccgccagcttgctgtttgtgtttgtcgtcagtctattgacgtcaaaaccggagcagcaggtgcttgatgaattcgagcaatacaaacaaacgctgtaacgatgacggagatggggaaccattctccgtctctctttttataggccttctccccccttctaacaggggattgatccattttttttaaaagtcgcatataagtctatacaagagtgtaaaggagaagtatgattaagttaaaaacgagtaggagaaaggatatggaagagctattagaacaagttgtttctctttcaaacattaatgagatcattgactttatcagcggggagctgaaaaagccggtcatactggaaagcgcagattttttcttattagcttacaactcctattatattaaccattttgatgcagcaaaccagcaaacgattttctccaaaaaatgtccgctgccgatctttgaaaagttcgtcgaagaaggcattattgatcaattgaaaacgattccgactccttttcgggtaaaacagattgaagaaatcggcttaaaccagcgggttgtcgtcagcgccaagcataaagacgaaataatgggctatatctgggtgcaggagattgaagacaacctgtctgatgaagagcttgatttcttatatcaagcttcctttcatgtcgggaagatcatttataagaaaaaacgcctcaaacaagaaaaagaagaacaggcggaagagctttacaaaaaggcaattaacgatcagtttcaaacggaaaaagagctgaaggccgccgccgataaagcgaacgtcgtcctgccggccgtgtttaccgtcatggtgcttcaagtcgttgacggggaggatgaactgctcgaagatctaaaggaaacgatccggtcttatttaaacctgaaagacaacatcagtcacgtactggaggatcattcgaatatcgcaatcattgtcggcagtgtgtcgcgcaagcgttccgcgctggccgctgcctcagaactgatcaaccgtctgttgacccatctgcgctcgcaaatgctgccccttattttgatcggggtcggcaatgagtacagcagcctgctgtccctcggcaaaagctacagagaggcgctccaagtgacgaaagcagcggagatcacgggaagccaagaacacattccctatgaatatcaaaagctcgggcttttcaaatatcttgaccaaatcgccgcaaaaaacgatcatctgcaatatgtaaacccggaccttcagctgctgaaagaaaaagataaagaaagccacaccgaatttttaagaacgcttgaaatctatctcgtcaacaattgcaaggtcaagccatccgcagaacagctgtttatccaccaaaacacgctcaactaccgaattaaacaaatattggaaatgacatcgattgatctcaatgattttaatacaagatgtcagttgtttatcgatttaatgctgatgaagaaagcaggctacaaatcgtaaacagaaaaagaaaagccggtacatgaagtgccggcttttaatatgtccgataaacgtaaggatctttcggctcttttattgcagaccaatccttcactttcagcacgggaattgtagatttgaaaggctgatagtattcggaagacagcgttccttttacatgaagccactggtcgtctttaatatccatattttcagggaactcgaccagcatgccatagacgccggagtcggcgatgcaatgaatgatgccgaagcggaggacaaacagctgtttgtcactgatcgcttcccctttaaaagcaaagccgtcgaattcgagcgttcggtcaaggaattctcccggataatgatagatcgtttccatgcccttcaaaaaatcatcatcttttaatgtaatatgctgtttttctttatactttttcaacgctttattcatcaattcatcatacccatcctggccgtagtagatgcttgtgtcggggcgcaggtactgggtttgggcataatgctccggctgttcgatcgctttgaacgagaagcccttcgacttgacgatattggaatcaagcgtcgctgccggcagaaaaagtccggtgcataaagggaagaagaacacgaaataaatgaacattctttgcagaaaaggcttatctttttcatgatcgtggtcatggccgcatccgcattcatggttacatcctttttcatccgagcttttcatataaatgtagaattgcacagctgtcaaaatggccagaagaataatagcgatgtatgaaaggtaagcgtatttcatattaatatattttgtcagattgccggatgcatgaagatgaaaaaagaaaaacgtaaacaacattaaaatgaatgtgcgaaacatgttctcacccctttaccaacagtgatccggctaagacaataacggcgatgtaggcgattaagacaaacacaaagcgctttttgaagatgccgagcatcatcagcagatttttgatgtccaccatcgctccgaatacgagaaaggcgatgagggagccgagggaaaacgtactgctgaaagaagaagcgataaaagcgtcgacctctgaacaaagggacagcacaaatgacagccccatcataacgagggaggaagatacatcattctgcccgatcgccaaaagagtcgatgttttaatatacgtctgcatcgctgctgcgacaaatgcgccgatgatcaaatattttccgactgagaaaaactcgtcaactgcatggcggagcgtcccgccgagcttttgcaggaaagactggctctcatggacatggtggtgatgtccgtgcgtcccgttttcgatcagctgattccctttaaattgataagagatgatcagcccggcaatgagagacaccgcaatcgccaacccgccccggtagaacacgacatcccatttgtttccgaaagcgatgaatgtcgagaataatacaatcggattgatgatcggggccgtcagcatgaaggcgaccaccgcatgaagcggcactccctttaaaagcagcctgcgggcaatcggaacgatgccgcactcgcaagccggaaacaataccccggcaaatgttcctgacaaaacggcgagaaatcggtttttcggaatgattttcgccatcatctcctccgtcacaaacatttgaatcaaacctgatataaaaaccccgatcaagacgaacggaatcgcttctattaatatactgataaatattgagttcagctgcagaaaggattgtgaagccacaaaaaaacctccgcgcaaatccatatttttagtttcaatctagcattataacataaattgaaaaaagcggttttgtgtggcgggggtcagataatgggaggcgcatgagtaacagaatcaatacacagccttgaaagggaatgttatgataagaatattcaaaaaatagaaaagaagaggggaaagaaaagatgcagcagccttatgatatgccgcttgaacagctttatcagtataaacctgaacggacggcaccggccgattttaaagagttctggaagggttcattggaggaattggcaaatgaaaaagcgggaccgcagcttgaaccgcatgaatatccggctgacggggtaaaagtctactggcttacatacagaagcatcgggggagcgcgaattaaaggctggtacgcagtacccgaccgccaagggcctcatcctgcgatcgtcaaataccacggctataacgcaagctatgacggagacattcacgatattgtcaattgggctcttcacggctatgcggcattcggtatgctggtccgcggacagaacagcagtgaagatacagagatctctcatcacggacatgtacccggctggatgacaaaaggaatcctcgatccgaaaacatattactacagaggggtctatttagatgccgtacgagcagtcgaagtggtcagcggttttgctgaagtcgatgaaaagcggatcggggtgatcggggcaagccaaggaggcgggctggccgtcgcggtttcggcgctgtccgatattccaaaagcagccgtgtccgaatacccttatttaagcaattttcaacgagcgatcgatacagcgatcgaccagccatatctcgaaatcaactcctttttcagaagaaacaccagtccggatattgagcaggcggccatgcataccctgtcttatttcgatgtcatgaaccttgcccaattggtcaaagcgaccgtactcatgtcgatcggactggttgacaccatcactccgccatccaccgtctttgcggcttacaatcacttggaaacggataaagaaataaaagtgtaccgttattttggacacgaatacattccgccgttccaaaccgaaaagctggcgtttctgagaaagcatctgaaataaataaaagcgaacacccggtgaagccgggtttttttatgtcttgatttaagaatatatcgtattataagatataattagagagggtgatgaaagtgaatacggaacaaaccatagaagtgatgaatcagaactggacggatatttactaccatctgcacatgaaacatgatgatcaattgtctcaccaagcggttcggatgcttcagcatatcgaaaaaaaccgctttgtgaccattggccatttagcaagattgttggatgtctctcataatacggcatcagaacatgtgaaaagactaatacaaaaagggcttgtacagaaaaacagggacagcagcgatgaacgcaaagtctacgtcacgttaacgcctgaaggtgaagaagcagtgaaacggcatacgagacttaatccgaaaaaactgcaaaaggtgctggagcaattaaatgaggaagaagtcgaaatggttaaaacagcattttccttgttaagccgggaggcaaaatcatgtttttaatagtaaaaatcggggtttctgcaatattgattgccattataaccgagattgcacgaaaatcgcctgaaatgggcggaatgattgcggctttgccgcttgtcagtctgctgagtttattttggctgagtgtacaaggggaatctttaaagcatttaagccaatttgcgaaaggcgtgctatgggggtttccagccacagcggttcttcttttgatcgtggttttgagtttaaaagcatcattcccggttatcatttctgttgtatttggaatatgcggatggggcgggtgtttaatgctgcaaaaggctctcatccatgcaatattcgggtgaaaggcgggttgtcctttggtataaggagctgcctgtgctgccgcacaagcagcctaagaaggtccggcggggggatggaacggaataacattccggtccgagtctaccacgtataaagcctggagtagtaaatcatcctcgccggaaaaggagcgtcccggtatgctccgtccggcggtatggatgtcgacagaaatcggaaataattgctcccgagtatttttaagtttatcggataagtctggacggtttcaggagcgagttcgtaggagaatgcttgagctttagtttgactgatcatgaactcttgatattctccattttgaaagtaatataaatagccctttaaacgatgcgcttcctggttgaccaaagagatatacagaccttctcggccggatttttcaacggggtttcctgctttgtcagacaggtaaatcaatcccgtttgagatgcgcttccgctgtatatttgacagttaacgggttcaatataagcagggtgtgccggcagccggtcaggatacggagcatgtgaaatcaattcaaaatagtagggcgctacatagtcggcatcccgattccatttgcaatcgcactcagcctttggatcgaacatgaaggtctgggtgatgatataaacgatatgtctgcccgcgggcacatgctggagcctgatgttgatttccttggacgaatgagcgggaacgatgaatggaaaggtttgcgagggccggtcatttccttcaaagaagacggatatatgaattcggtcttcctcattcgcatggttgcagtagacgtatgaggcttggaaatggccagatgaatcggtttgatagcttactttgtttctgtcgatcgtataaaggttttctgcgtgaaaatgagttgatctgaggaaatgaataataccgcctccgtttcacagtatagtaagccgccggagtacccggcagcttcatattattttttgatataaacctctgtccgcttttccaggaaatcctggagcaaagcgatccccgagcaaatggcccagtaaatcaaggcaactaaaatgtacatcgtcatatagtcgaattcccgtccgccgacgatttttgcctgctgaaacaattcaggcacggtgatcatggcggccagggaagacgctttaacgagatcaagcatcacgttcgcaagaggcgggagcgcaatcctaaccgattgagggacaatcacgtggcgcatcgtctgccagtaggagaatccgaccgattttgcagcgtcccactgccctctgtcaacggacgacagggccgagcggataatctcggcaatgtatgcggcgctgttgatgctgaagccgattaaggcagcagccaaagccgtaaattggattccgatataaggaaaaccgaaataaaggataaatagtatgacaaggatcggaacgcctctcataaacgagatatagattcttgccggccaacgaagcaaagcgagcccggacatgcgcccaagcgcgatgaaaaaaccgagaattaaaccggcaaacatgctcgcaaaagaaatgaaaagcgtattccatatgccttgcatcacataaggaaacgatttcgcagccaattctgcattaaaaatatactcccattgaatagagcccaatttaaatccctctatttattcacatcgacatcgatatagtcgatatcctgctttttcgaaacatcggcaccgccgaaaaactttttcgaaatctttttgattgtgccgtccttcagcatttcatcaatcgttttgtcgaattgttttttaagttcagtgtttccttttttcatgatcatgccttgctgatgcggatagtatttaagatcgggatgaattgtcagatccagatcaggcattgcggagagcgcgagcttttgaaggtagtagtcgtttaagatgacgtcggttcttccattcgctacatcctttaaaaattgatcatttgtcgcgttgtcgtaaatgacttcctctgctccgtatttgcgtgcgatatccatgtaaactgtcgtagctgcaccagcggctttctttccttttaagtcctcaagcgtgtggatgcctgataagtcttttttgcggacgatagccgttccgaatgaatatttataaggcgtagagaacaaaaacttttctttgcggtcgtctgtcatcgtaatatcgttggcggcagcgtctacttgtccgctccccaccgcagtcagcatgccgtcaaagcccatttctttaaattcgacatccaggtcgagccgttcagccgcttcacggatgacttcaacttcgtagccggtcagcttgtccttgccggaatcagtgtcatgatatgaagtggggtaaagggttcctgaagtcgctaccacgatcttccctttttcctttatctcatcccaggccgtttttttgttttcagccttattttgagctgtgctgcatgcagctgttataagagcaagcgccaacacagttatcaacaatgtaatgcgcttatacgtatgcaatttattcacttaaaacaatcctcctattcctttagtcaagtaaaccatagcactgaagtagggattaggcaataagataattagtattgggaaaaaataaaatgattgattgtgcaacctgctttactttttaaggtgaaagatggaatcataaaggtattggcaaattgaaacataaggaggataagaaagatgaaaaatattttaatcatcaacgggcatgaagcctatccccatgcaagaggacagctcaatcacactatttttacagcgatggcggacaagctgagcgaaaaatatgaagtgaaaaaaacagtggtggcagacggctatcaaatcccggaggaacacgagaaattcaagtgggctgatgccgttatttatcagacgcctgtttactggttcagcgttcctgctttatttaaaaaatatattgatgaaatttatgagtacgggcttttttatcaagggtctgaagactacggaagaggcggactgtttaccgataaaaagtatatgttttcaaccacatggaacgcgccgaaggatgtattctccaaggcggggacattcttcgaaggtaaaagccttgatgaagcgctgtttcatttgcacaaaatgcaggaattcgtcggcatgaagcctttaaaaacattctctgtccatgatgtaatcagcaatccgcaagtggatcaatatttagctgatctggacgcccatttaaaagaagtattttcgatttaagtaaagaggtttgtgcacaagcgcagaccactttttttcgttaccctccaagaaaacgtgatacagttgagtaaaagcaaagcagggggtgtccgcatgtttttaaaaaagctgactttacttcgggaaggagttccttcttatgcaaaatatccattttcaattcctgctattcaacatttaaaagaactgacgtttcaaaaaaacgtaacattttttgtcggggaaaacggatcgggcaaatcgacgctgcttgaagcaatcgcagataaatgcgaatttaacacagccggcgggggaagaaataacacatatgaagtgtacggctccggatcggctcttggagactatatcagattgtcgtggcttcccaaagtaacaaacggcttttttctgcgcgctgaatctttctatcattttgccactcatattgatgaagtggatatcacgggatttcgaagctacggaggcagatctcttcacgagcagtcgcacggcgaatcttttttatcgcttttcaagcatcgttttaaagaaaaggggatttatcttctagatgagcctgaagcggccttatctccggcaagacaagctggcattcttgaaaatcattcatgatttgacgaaatccagccaggctcagtttatcatcgcttcccactcccccattttattagggtatccggaagccgaaatctttagttttgatggtgaacaaatcgctgaagtgaactatgaggatacggatcattacactttaaccaagtattttcttcagcaccgggaaaagcttttggcggagctgtttttagatgacgtttgatctgaaacgcgtttcataggatatgataaggagcatccggatcaaaatatgaaacaggagttgagctatatgattcatcagcgactacgcccatttccagatcatttcctatggggatcagcatctgcagcctaccagatcgaaggagcctggaatgaagacggcaaggggctttcggtttgggatgtgttcacaaagattcccggaaaaacgtttaaaggaagcaatggagacattgcggtcgaccattaccaccgttttaaagaagatgttgctttaatggctgagatggggttaaaagcataccgcttttcagtcagctggccgaggatttttccgcagggcaggggagaagccaatgaagcgggtttgagattttacgatgacttgattaatgagctccttgctcatgatattgaacctgttttgacgctttatcattgggatcttccccaggctttaatggatgaatacggcggctttgaatccagaagaattatagaggatttcaatgcgtattgcgttacgctctataagcggtatggaggcagggttaaatattgggtgtcccttaacgagcaaaattacaactttaatcacggctttatcacagcgatgcatcctccgggtgtgaaggatagaaaacgcttctatgaggctaaccatattgcatttctagcgaatgcaaaggcaatcgattcttttcgccggtatgttcccgatggaaaaatcggaccgagttttgcttattcgcctgcatatcccctctccagccgtccggatgatatcctcgccttcgagaatgccgaggaatttacaaactattggtggcttgatatgtactgccggggaacatatccggacatccctttaaagtatctgaaggaaaaaggctgggcgccgacaattgaagatggggatatggagcttttagcaaaaggaaaacccgattttgtcggtgtgaattattatcaaaccatcacatatgaaatgaatcctcttgacggggtatcggaaggaaagatgaatacgaccggccaaaagggaagcaatcaggaaacaggcatgccgggtttatacaaaacaaaaaggaaccctcatcttgagacatcgaattgggattgggccattgacccgatcggtctaagaatcggacttcgcaggatttccagccgctatgggcttccgcttttcataacggaaaacgggctgggggaattcgataaggttgaaaatgacggcacgattcatgatgactacagaattgcctacttgcgtgcgcaccttgaacaatgcagacaggctttaaacgacggagtcgatttaatcggctactgcagctggtcatttacagatttattgagctggctgaacggctaccagaaaagatacggtttcgtttatattaaccgtgatgaagagaatgtaaaggacttgaagagaattaaaaaagacagcttttactggtaccaaaacgtcattcagacaaacggggaagagctttaggaggggcgccggatgaaaccggcgcctttatccgttgtttaatcctgtttaaaatcgagaagataggtgatctgtgcagtgccgctgtgatcaggcattattgtatagcatgtcagctgataggcgccttgcgggatatcgcatgtcaatttcttggatagaacgcttgcaatttcgaccccgtcataaagcacttcgaaaggaacggtgacgcgcctgttgaaggagagcacctgtttttggacattcaaacggacttctactgaagatgccgtgttttcgagagcttcaaacgagaccgcgtgctctcccgttgtatatcctcttttaatatcctcgtctgtccaatccataacgggcggctttccgcctttctgataaacggtaaactgatggtatgacatcgtcatttcttgtgcttcccactttttgatcaaagaccgtacccccagtgttaattaatcttgaaaagtactttcgtcccgtccggataatcgcttacctgattgcccacccaagatcctgctccacggttatcagacgggctgatatactcgacagaagcacctgttccgccttcttcgcacatggccatcggccactcgtcgcggtcatagcctgatttggaaggaacatctttcaatgaatcctttcggcgttcggcggctccgtccctgtcgatcgtacagatttcggagtgcccttttttgatagcctttcgaatgtgtgcgcctgtttcaggatagcggtccgaaggaaaaatcagcacttcatcgtagtttgagccgttttgccggcccgaaggctggtgttctgaagtgaaaaagtcgccagatacaataccgatgatcacgacggcgacggcgagcaaggtgatcagcaaagatttaatcttgtccattcttgttgtcctgctttcttatgttaaatcattcggccgcagtggaccggaagtaaatacaactttattatcgtaaaaatgatttgagaaataaaggagagattgataagtttttcctctcgaaatgctgagtttccgtctatcaaatcgctttttttaaaattttgccggtcgtttagaaagttttagaggttcaaaatttaaatttttcatatgaaagaaaaactttcaggccccctttatcaagcctttctgcgcgaatgatatgaaatacaagacagaaaaggagctgatcgagttgcttcgcaagctattgcttgaaggaggtgcttcacagcgtttcacttcttcacagccgggggattacaagacggcgaacttcttccgcaacgacggcgaatccttttccgtgttctcctgctcttgcagcttctattgaagcgttcaaagcgagcaggttggtttgatcggcaatctccgtgatcgcttttgaaatgctgccgatttcatatgatcttgtattttaagcatttcaatgatttctccgctttgatgaccgattgatgcatcgtgtgaatttgccgcatcgtttcggagatatcttttgccccctgttttgcttttttgcgggcgtattggctcttttcattcaggatcgcagcgttttctgatatgttttgaatatcggcggaaacttgttcaacggcttgtttgctgcctgctatccccgatgtctgcatttccgatgaacttgcgatatgctggacggcttcggtgattttctcagaagcgaggcttgtttcttcagctccagatgtcagctgatcagaagcggcagctacactgtgcgacgactgtgaaattttttgcatcagccggtttaggctgtcattcatttgattgaaatgatgtgacaagtcgcccagttcatctgtcgaatcatcctggatctcggttgtcaaattgccgctgcccgcctgttcaaaagcatgagtcagcattctgagccttccgcctatccttttggtgaaaatgaggacaagcaaaatggagatgatgattgaagcagtcagaacgatagcaaaaattttcaggaacgattgaagagtgcttgtgatcatatcctggtcggcccctgtataaaagatgccgataacttcaccgctcttgtctttgatcggcatatatgccgtttgatatgtttttcccgctacatctgcttttccataaaagttttttccttcttttaaaaccgcatttgctacctccgaagacactttcgttccgacagcgcgttttccgtctaccgtcacatttgtagatacgcgcgtgtcatattgaaagatggtgacagtgtctttcgtatcattgccgatttggtcgacgagttcttcatttccgttgataagggtcgaacctttgtagagcctgtcttctttgacttcccaatcaccttcaagagattcattcaaataacggtagctcaatttcaaatcgcttttggctttctctgtcgccatctgttctaactcttttgaaagctctttgataatgaaaatcccgagtgctgacgaaaagatcagaataacggctaacacgagaagattaattttcgtccccaatttcagcttaaatcgctttcatgtttcacctgtatacaatatcggttaaaacggaggcgtgttgacaaaatgaaaaagaaaaccccgcttgtgaaaacggggttttggacaatctgaaagcctaaagttcctctgctttttcggcttttcctgtttcatactgtttttgtttatttgcgatgtagcttcttgcctcttgatgcatgcgatgtttcattttatagacttcactgttttgatagatatgtgaattgtagtttaacggagacgcatttttcccttttcctgttgcgtcgattaaggcggaatagtcggtctggatcatttgctgaatatgttcagaggccgagtattctcttttgagcagtccatcaagatcttcgacagccttgattgtgtcttttctgttttggtttgcagcgtcaagctgctgtttgatttcatcggatgagaacggctgtagcgatattaaatcatctatctgtcctaaaatattcgacagctcttgctgctgtgcggagaccatgttttgagagtgaatgtggacatttgcaagctcctgttcaagaaattgaacatcaacgaacgtatcctctgaaagtccggcattttcggcagcagaagatacaccattcagaaactgaatctgcatatcggttaaatccagccagccgtctacgactcctgataggtctctgtaaaacgctttaatggcatcggcgccttttccttgaaactcatcaagttctgcgacgctgtttaacgctttttttaagctgacgagctgttctctcaaatttttatattcatcagatctttgcttcatagctgaaattagggtttccgcttcgtagactttcattggaaatctgcccttcctgcgacttatatagtacagagtgtaccactttgccacagggaattgggcaataaatcctgaatatccatgaaaattaatctttatgatcaaatctgcgagacgtttaggttttttgtcgcaacagatgatctttgctttagtagttaattagtcctctttatgacaggaatgtgtcgatggaccgaagaaaagctgaacaccaaaaatgtgaaatactgtgaacaacacaattgaaaatgtgattttatggtatcttaaaataaaatattaaacaaaaaagacttggaatattgtaattaaacataattgactactttctcatgcttgattagtatgatagtaaaatattttaaaaaaaggatatttttaaaaggggagatcgggattgaatgaagaaggttaccggcttggaattgatattggaggaacttttaccgatcttacattgttaaatccggcggacggaagcatgaccgcagttaaaacgccgaccgttcccgaagatccggcccgaggaatcatcaacggcttggctctcttgaaaactcggggtgtccagccttcagaaattcatcactttgtacacggcatgacaatcggtttgaacacattattacaacgcaaaggggctgatattgctttattcgtaaccgaaggtttccgtgatattctttcgcttcagcgtctccggcttccggtaccctacgattttagatctagaatgccggagcccctcattcctcggaaaaacgtgtttcccattcaagaaagaatgctttatgacggctctgaaaagctgccgcttcatatggaagatatcgatgaggcggttggacaagctttaagaaaaggcttaaaaggaatcgttgtttcttttttgcacagctatcggaatccgctccatgaacgccaggctgccgaacggatcaggcaaatagcgcccgagcttgaggtggcaacgtctgcggagctttggccgcaaatgagagaatacgaacgaacggttatgtccgtcgcgaatctatacatcaaaccgaatatccatcactactttggaacgctgaaagagaggcttgtccaggaaggaatatcggcgcagccgtttatcacccagtccaacggaggactgatggacattgaatcggctgccgaggcacctgtcaaaacgcttttttccggaccggcagcgggggtcataggatccatcagaacggcggaagccgccggcgaggccaatatcatcacctttgatgtcggaggaaccagcgcagatatttcgattgttgaaaaaggagagccgacctttacccagtcaaatcaaatctcgggatttccgattgcgattccatctgtagcaatgtattcgatcggtgccggcggaggatcggtggcatggattgacagcggcggtctcttgaaagtagggccggagtcagttggctctgatccggggccggcctgttacggaaaaggaacaaaggccgcacttacagatgcgtttcttatatgtcattatttaaacccaaacaggtttgcagcaggaaatatgaaactgtaccgggaaagagccgaaaaagcgctcctcccggttgccgagtatttaggcacagatgtggagcaagccgcggataagatgattcaagttgcgcttgccaatatgtacacggaactaagcaatgtcatggagcaacacgggtttaacccgcgtgaattcagccttatggcttttggaggcgcaggcccggttactgctaattttttggctgaggaaattcaggccaaaaatgtgctgatcccgccgcatccgggaactctatcggctttgggcgcactgacggctgattttatctacgatgctgtatgttcaagacaggtgctgcttgagcaaataaaaacggctgagttaaaagtggagtttatgaggctgcaagaacaggcggaaacatggctgcggaaacaacgggcggacatggtgactgaagcctctcttctttacttgcttgatgcccgttataaaggtcaggcgtatgaaattgagctccctgtttcaccggaatggctggaaggcgaaagtacgagtgaaatcgcagactcctttcatctcttacatgggaagcaatatggacacagcgatgggaaagcaagcattgaattgatgaatatgcgcgtccgcattataggcaagacgccgaaaccgccaggcggaaaaggatgtcaaagtaatctgcccgaagctgaacctgtcagccaaagaaagatcatcatgaaaggcggtacatatcaagcctccgtataccgccgttcagatttaaggagcggacagagaatagatgggccggccattgttgagcaggacgatacaacgacgctgattttgccaaattggagcgggaaaaccgatcatgccggaaatttgatcattgaacggaaggagagctgaccatgcgcacagatcctgcccggctggaaatgatgagaagctactttaacgcgatagccgcgggaatggggcacgttattgaacggacgtcctttaccacatttgtaaaagaatcggctgatttcgctactgcgcttgcgacgccggaaggggagtttttcgtttatccgaaaacaatcggcgtcacgatttttttagggctttcattaaaacgggtcatcgaagaaagcggcccatttgaaccgggagatattatcctcacaaacgatccttatacaacggacggattggcgacccacttgcctgatattcatgtggtgaagccgattttcttggagggcgagataatcagttacgcgtggtgctttgtccattgcagcgatgtcggcggccttgtcccggcaagcatttcgccgaccgcgacagacatccatcaggaaggcctgagaataccgccggcaaggatttacaaaaaggggagagaaaatcgcgatatattgaaggttttgcgggcaaacagcagggttcccgacttaaatgaaggggatattcatgcgatggtggccgcggtcaatacggcggagaatcgattgacagaaatggtcggaaagtttggaaaagaagcggtccaacaaggaatggatgatttgctcgaacaagccgcgatgagagccggacgggtaatcagcaggattccggaaggttcatacagtttttcagattatcttgatgacgatatgatttctgacgttccgatccgcttggctgttacggcaaacgtctcgggaggggagatcacattggacttttcagactgtgatcctcaggtgaagacagcatttaaccttgtcactaatggaagcaaacattcatttctatatcagggcctgatcaactatatcataagtgaagacccgtatattccgattaacggggatctgacacggccgatccaagttatcgctccaaagggtacgctggttcatccggaatatcctgcggcggtcggcattcgtcattcgatcacgatgagactttataatgctgtactgggcgctttggcaaaggcgcttccgaaagccgtgcctgcagcaggcgccggtcagtcagcgattgtcgtactgtcggttcccgatgaatcaactggcagcaggaagatgtcggtggtcgaaccgatgggaggcggaggaggcggccagcatgacatggacggagcagatggaattgaccatgcctccggatttttgaaaaatacgccgattgaaagccttgaacagcacatcgacatccatgttcgccgctatgaattgatcaaaaatacagccggagccggttttcacaggggaggccatgcaatcgggctggagtttgaagcggcggcaccagaatcaattgtgaccgcaagagggatggagaggatgcgttttcatccgtgggggctcgccgggggaacggcaggagcgctcgggcgggtgcgcctttatccggatcagcctcaggagaaaacgatgtcgaagatcgatgttctaaagctcaataaaggggatgttatcagcattcattcaccaggcggcggaggctggggaaatcccttccgccgggaagctgaatcgattttaggagaagttgaagcgggcttgctgagcccggaagcggcatatcatcaatacggcgttgctgtaaaagaaaacggcgctggctccttcattattgatctggaagaaacagctgaaatcagaaaaaagaaagcaggcgaacatcggaaacaatgggatttcggaatcgccagagaagaatacgaacggtgctggacagaagaagccagcagcacattggcccggcttctgcgacagcttccggctcatcaaaggtcacatgttaaacatttagtccaccgttatttctcaaaagaacataacggtccgatcagtaaaagcgaagttgcggccgctgtggaaaaactggctggaaaaaataacacgggaatggtgagatgacaatgaaaagtaaaatttctgctttatttattctgtctcttgcagcggtgctcctcctttcgggatgcggcggaaatggaagtcaggaaagcaaacaatcagatacagtcgttatcggcgtctatgggggcgattgggaaaaacatatcaagccgagcctcgaatcttttgaaaaagaaacagggctgaaggtcaaagttgtcgcagggacagactctgagtggttcacaaaactcaaggcatcgaatggcagaaatgctccctatgatctcttaattctgcagccggacacgattcacagagcgcagtcggcgggattgctggcaccgatcgatcaggaaaaggttccgaatgtccgcgatctgtaccactctgttcagaaacgcttcaccgatgatggaaagcagtatgcggccggtttcagtatgggacaactcggaattgtctaccgaaaggatcttgtaccacaggagcctaagcgctggacggatctttggaacagcagctataaaggtcatgtcgccatatcatcgccggcttattcggcggggcttcagttttttgtaggattaatcaatgcccagggcggcctggagtcaaacgggaaagacgtggataaagcgttcaacagcttggctgatttaaagaacaacataacggcctatcccgataatccaggctcgatacaaacgcttctggaacgtggggatgcatgggttgttccgttttgggacggccgcgctttttctttgcaggatgcaggtcttgacctgggatttgcatatcccgaggaaggtgcagtcgcagcagttgcaagctgggctttaatgaaaggaagtcctaatcaggataatgcgtacaagctgttaaatcatctgctcagtccagaagtgcaaggagattttgccgatagaacgttttacggcatggccaataaaaaagtgaaatacagcgataaattaaaagggaagatcaaagtaggggaggattattacaggaatttaaaatgggttgactatgaagtcgcggcaaaagatctaggcgattggacaaatcgctggaatcaagtacttggcggaaaataggtgacaaacatgagcgcaattcagattaggcatgtcagccggcatttcggaaacaccatcgcattggaagacgtacagcttgaagtcaaagaaggggagtttttctccctccttggtccgagcggctgcggaaagtcaacgctcctgaatattattgccgggttccttgaaccgacgtcaggttttgtatatataggaggacgagatgtaactgatttgccgccatacgaccgacatatcggaatggtttttcaggattatgctttattcccgcatctcagcgtttttgacaatgttgcatacggcttgaaagtccgaaaatggccccgccgcaagattgaagaaagggtgatggaatgcctcgctcttgtcaggcttgaagcgtttgctaatcgcatgccccatcagctgagcgggggtcagcagcagcgggtggcgattgcccgggcattggccgttcagccgtctgtgcttttgctagacgagccgctgagcaacctggatgcgaaacttcgaaaagaaatgcagacggagctgcgcagcatccaaaagcgcgtcggcattacaacgattttagtgacgcacgaccaggaggaggctttaagcttatcggacaggattggaattctcggatgcgggaggcttcagcagctcggcactccgttggacgtgtaccgcacgcctgccaatcaatttgtggccgaatttatcggacaggtcaatttactgaacgcgcgtgcgtcgaagatacagccttcatcgggcggctatggatacgaaacggtcgatttcgaagtgtatgaaggcgttccgctgacatttgaaatcaaccaggaactctcaaaaaaaacttctgtattgttcatggtgcggcctgagaggatctcagtctccttcgagaagcaaaagaacaggctgattgaaatgcctgcaacaataaccgaagtcagttacgccgggcatgctctcaggctgaaagccgctgttttcaaaggagaatggatcattcagacgcccgatcctcaattccctagattgccgaaggcgggagatcaagtgtatctttctttggagccgggcgattttgttccgctggatgttaaggaggatgcagatgagggctgttgaacaaaaacggttttattggtttttgctagttcctgtccttttatttctcggcgtttttcttgttttgccgcttgttctgctgctgttattaagtttcagagacgtggacgctatgatgaatacgctcgatacgtatagtttttctcaatatgtcgaggtgttctcttcagacgtttatttgaaaacaatcggtataacgatttggacggcgttgaagaccactgttttatgccttgtgatggcgtatccggcggcatatttactcgttaaggcgccaaccggcaggctgcgggctttgttttacattttgcttgtttcccctttattgaccagtgttgtcattcggacgttttcctggattgtgctgctttcgcaaaacgggatcgtcaacgaggcgcttatcagtatgaagatgattgaaaagcccctgccgcttttatggaatatgaacgcagtcatcattgcatatgtccaggttatgctgccgtttgcagtactgccgcttgccagttctttaagcgaagtgaaacctgatcttaaatttgcttcgatgagccttggagcgggcaggctgcggacattttttttcgttaccttgccgatgacggttccgggattgctgacaggagcaatgatcgtgttttcgctttctgccggaagctatattacgcctcttctcgtcgggggaaggatgcagccgctcctgccgttgtccatctatcagcaggtcatgcaagtctttcatcttcctcttgcagccgcaatgtcgattactttattagccgttgtcagcgtggttattggaatccttggcattttccaaaagcgttgggaggcgagaataaatgggtaggcgattgcgacgtatgcgcaggggaaaatggattgatgcgtgtgtttggacagcgggtttattggtatacttctttttggcgctgcccgtcttcgtgatcatactgtcggcattcagcccggacgaatatccgaagttcccgccatcaggcatctcgctgcgctggtttgccggagttttcagcagcagcggctggatggaatcgatttgggtcagctttatgctgcttctcgttgtaacgcctcttgcggtgatccttggaacagttgcagcctatgcattggcgcggctgaactttccgggaaaacaggcgattcaggcttttgttttatcgccgttgatgattccccaaatcgcattaggcgtatcatttctctatttattgacaatgattggggtaaacggcacgtttgccggtctggccgccgggcatatgctgatcagccttccgtatgtcgttcggacggtcggagtcagcatggcaaacgtggatcagaagcttgaactggcatccatgaatctcggcgcaggtccctggcataccttttttcatgtcatcttgccgcttattaaaccgggaatcattgcgggagccgtttttgcctctgtaacgtcattcggagaaatatcaatcagtctgtttgtttcttcaccggctgtcacgcctgtaccggttcgtacattcagctatattgaccagacatttgatccgagcgttcatgcgatttcggttatttttatcacggtttcagtgattgcgctgatcatcatcgaacggacgatcgggctctcaaaaaccatgtagcaggcgaaactcagcctgcttttttgtatggagcatcggaagtatttcaagataccgttcagaatgagacagttcagcaaatttaacattctgcttcaatgttttcgcaagccggtttgtcttttctcgtcagtttaaacggcctggtaaaagaaacgttttaattgaatgaacattgtaaaaggaagcgccgaagctttaacaggccttcatgatttatttatgaagtccatgctgtttttttaatattttaatatactctttatctaagatttggaattttttgcgggtttaaacgatttttttcgttttcccgcatatttttttgtcaatttcgggatcgcgcattaacattcatgtacaacattcggtatcccgcatgaaacttttcacctatttttcggtgaaaaaaacaaaattttcatttaaagtgaactgtgagcagaaaatgaatttatatcaagaaaagcagataaaggcaaacctgcggaaacgcagggacgcaaagccatggcctaaggtgctgacggtgctacggttgacaggttgccgaataaacagggagttcgcccgtttttattcgggcgggctcttttctttttatttccaatataatgttttattggaaacgacaaatctgtgacagcgtttttcgctcatcgcaaaaccgcaacattgcattgcggctggctgttcgcatcgtcatacataacaagagataaaggaggaataaagaatgggaaacacattttacccgctgacacatgctcaaaggcgaatttggtacacggaaaagttctatcccggtacaagtgtttcaaatttgagcggctttggaaaattaaaatctgcatccggaatcgattccgggttattgactgaagcgattcgcaagtttgttcgtacgaatgacacgatgcgattcaggctgatgtttgaaggagaggatgagccgaagcagtatatagcggaagacgaacctttccaaattgaatattttgatgcttcagaaagcggaggagcagacggcgttcttaaatggggacaagctgaggcgcgccggcccctgcctttgtatgacagtccgctgtttaaatttgccgttgttcgcattagtgaagaagaaagctggttttttgcaaaagttcatcatatcatttccgacggcatttctatgacgatcctaggcaaccggattacagatatttatttgaagcttgccaaaggggaaaccgaccttgaacctgtacagtcatcatttacggaacatatccagagcgaattggagtatgaaaattcgaagcgtttccagaaggataaagcatattggaacgcacaatatgaagcgattccggagcccgtatcgttaaaagcgagcgatacgtatcagatccaattggatgcagcccgcttttcaaaagagatttcccctgacctgtataaaaaaattcaaacgtattgtaatgaacacaacatcagtgtactctccctgttcctatccattctgcacatctatatgcaccgggtaaccggacaaaaagacgtcgttctcggaacatttatgggtaaccggacaaatgcaaaagaaaaacagatgctcgggatgtttgtgtcgacgattccgatgaaagcctccattgaagtacaccaagactttagtgcatttgtgcaggaaagaatgaaggaccagctgaaaatcattcggcatcaaaagtatccgtacaatctgctgattaatgatttgcgggaaagacagccgcatgtcagcaaattgttcgccgtctcactggaatatcaggttatgcaatggcagcaaaaagaaacggtgtcgtttcttaccgagccgattttcagcggcagtgaagtaaacgatatttccattcatgtgaaagagagatgggataccgggacgcttgcgattgattttgattacagggaggagctttttacttcggaagaaatggccgtgttatatgaacggctgatgacgctgcttgaagatgccctgctgtctccgcaaaaaacaatcgctgaactggagattgttcccgcttttgaaaaagagcggctgttaaagcgtgcatcaagccaaaccattgcatatgacaagaacatgaccctgcacggtttatttgaacaaaaagcagccgatcatcccgaaaaaacagcggttgtatatgaaggacaaaaactttcgtaccgggagttgaatgaacaatcgagccgcttggcaatggcgcttcggagaagaggcatcgggcctgatgctccggctgcgatagtgatggagcggtcagagcgggtcatcacggcgatgctgggcgttttgaaagccggcggagcttatgtaccgatcgatcctggatttccggaagaaagaatccgttttatgctggaggattcaaaggcgaaagcggttatcacagacagcgggctgacttttgaaacggctgaaacggtgcagttcagcgaagcgctttctgaatcgcgggaaaacggctatccgtcttcagcggcaggcgccgggcaccttgcatacatcatttatacttccggtacaacgggccgtccaaaaggcgtcatgattgaacacaggcaggtccaccaccttgtcagaggacttcaacaggccgttggtacatacgatcaggatgatttgaaactggcgcttctggctccatttcattttgatgcttccgttcagcagatttttacgtctctattgctcgggcaaacgttgtacatcgtaccgaaaaagacggtttccgacggacgcgctttatcggattattaccgccggcatcaaatcgatgtgacagacggtacaccggcacatttgcagcttttggctgcggctgatgatctttcaggcgtcaaactgaggcatatgcttgttggaggagaggctttatcaagggttgcgacggaaaggctgcttcagttatttgcagaaacagctgaatccgtgcctgctgttacgaatgtttacggaccgacggaaacttgtgtggatgcctcttcttttacgattacaaaccgcacagatcttcaatacgatacggcctatgtaccgattggccggccgataggaaataaccgtttttatattttggatgaaaacggcgcactccttcctgatggcgtcgaaggggaattgtatattgcaggagacggagtcgggcgaggctatttgaacttgcctgacatgaccagagacaggttcttgaaagacccgtttgtatccggaggtctcatgtatcgaacaggggatactgcacgttggcttcctgacggtacagttgattttatcggccgaagagacgatcaagtgaaaatccgcggcttccggatcgagcttggcgagatagagtcggtgctgcaaggagcccctgctgtcgaaaaagcagttgtcctcgcgcggcatgaaaccggcggcagccttgaggtttgcgcttatgtcgttccgaaacaaggcggaaagattcacattcagggactgagggagcacttatccaaacacctgcctgattatatgatcccttcctgctttgtcgagcttaatgaaataccgctgacggcaagcggaaaagtcgaccggaaagcgctgcttcgccatgaggtgtctgtcagcgggactgcagaatatgcggcgccgagaaatgaatgtgaagaaaaaatggtgggtatatggcaggaagtgctcggagctgaacaagtcggaatccacgaccagttttttgatctgggcggccactctctcaaagcgatgaccatgctggcaaaaattcataaagctttcggagtcgaagttccgttgcaagtcctatttgaaaagccgacagtagcggcgctgagcggctttgtttctgaagccgagaaagacggattcgcggtaattgaaccggcgccggaaagtgacgattatcctctttcattggcgcagcagcgaatctatatcgtcagccagctggagggtgccggagtcggctacaatatgccggccgcggcgatgcttgaaggcactcttgactctgggcgccttgaagctgcttttcaaaaactgattgataggcatgaggcgctgcgtacttcgtttacagttgtggatggcgagccgaggcagaccgttcatcaaagggttcagttcaagattgagaaggttaaggcggaaggcaagcagatcgaacaaatcgcgaaatcatttgtccgccgctttgatctcgccaaagctccgctgatgagagcgggtctcgtcagccttgcagacggcagacatctgctgttgttcgatatgcatcatctcgtatctgacggcgtgtcgatttcgatcatattgaatgaactggccgcgctgtataacggggaggaattgccggagctgcgtttgcattacaaagattatgccttctggcaaagggcgcaggcacaagaaggctttcaaaaagaagaggcctattggaaaagcatgtttgccggcgagcttcccgtactgcagctgatgacggacgagccgaggccgcctgttcaaagctttgaaggagacagggtatccgcagtcctgccaaaagacctgaaagaaaaattagccgtgctggcagagcaaaacggcgcgacattgtacatggtcatgctgtctgcgtacaacatgcttcttgcaaagtactccgggcaggaagatgtgatcgtcgggacgccggcggccggccgcagacattccgatctggaaggaatcatcggcatgtttgtcaatacgctggcgatccgttcaaaagtggacccgggcagaacgttcgcagacttcctgaatgatgtaaagaaaacggtaatcgatgcttttgagcatcaggattatccgtttgagcggcttgcggagaagtttggcgcatcgcgcgatttaagccgtcatcccatctttgacacgatgtttattttgcagaatgcatgggaagacattccgctgctcggcgatttgcacctctcgatttatgaaacgaacttcaatattgcaaaattcgacttgacgctgcaggcaaaagaagagcatggagaattgattctcgatttggattacagcacgaagctgtttaaaaaagatacggctgaaaggatgctgaaagcatacttgaaccttctggaggacatggcggctgatccgatgctcaggatcggcgagtacagccttttgacagaagaagaaacgaatcgccagctcgtcgcgttcaaccccgcgacaagcgattatccgcgggagaaaacgatcgttcagctattcgaggaacaggctgcagaaagaggcggttatcccgccctgcaatttgaagacaaagtatggtcatatgatgagctcaatcggaaagcgaaccaattggcaaggcgcctccgcaaaagtggcgtgcaagccggcacgacggcggccattcttacggccaggtcggctgaaatggtcatcggcattctcgctgtgctgaaagccggcggggcttatgtgccgatcgatcccgatcatccggaaaagcgtgtgcaacatttcttcaaggacagcggagcggcggttcttttaacgcaaaaggcgatgaagccgctcgctgaggcggcggaatttggcggcgacatcctatttgttgaggatgaaaacctttatatgggagatgcgtctgatttgcgccttccgatttctccggaagcaatggcaaatctaacgtacacatctggaacgacagggacgccgaagggcaatatggtctctcaccggaatattttgcgtactgtaaaaaacgcgaattacttggaagtgatggaatccgatatcgttctttcgatttcaaattatgtgttcgacgcctttatgtttgatgtgttcggttcattgctgaacggcgccaagctggtgatagctccaaaagacacgattcttgatatgagccggctcgcacatgtactcgaaaaagaaaagattacgattttaatgatcacgaccgcattattcaatctgctgacagacatgcggccggacagtttgaagggactccgcagggttctgttcggcggcgaacgtgcatctgtcgatcatgtcagaagagctctgaagacagttggcagagggcggctgcttcatatgtacggtccgtctgagagcacggtctttacaacctaccatccagtcaatgaagtgccggacgatgcgcaggctataccgatcggaaagcctgtcagcaatacggaggttctgattcttgattcattcagcaatgtacagccggcaggggttgcgggagaattatgcgtcggcggagacggccttgtccgcggctattttaaccgccctgaactgacggctgaaaagtttacggcgcatccgttcaaaaccggcgaaaagatttaccggacgggtgatatggcgagatggcttgccgacggatgcctcgaatttatcggtcggattgatcatcaggtcaaaattcgcggacagagaatcgagctgggcgaaatcgagcatcatctcctaacgcatgacatggttcaggaagccgctgttcttgctgttgacaccggggcgggagatcaaatgatctgtgcatactttacggctgatcaggagctttcgagccaagagcttcgccgacatgcggcagaaggtctgccaggctatatgatcccgtctgtgtttatgcagcttgatgagcttccgctcacaggcaatggaaagatcgacagaagggcgctgcctgaaccggatatcgcgcaggccgcgcaaaaggaatatacggcgccaaggagcggcacagaagcgcagcttgccgatctttggcaggaggtgctcaatgtaccgaaaatcggtgtgcatgacaatttttttgaactcggcggacactctttactcggaatgacgctcatcgcccgcatccagcaagagatgaatgttgacctgcagctgaaagacttgttccaggcgccgacaatcgaaagcctggcccaggcggcggcaaaatctgagaaaaaatctgccgtttatattgaagcggcgccggaccgggaaacgtaccccgtttcgtcggcgcaaaaacggctgtacgttcttcagcagattgaaggcgctgagaaaagctataacatgccggccgttctccaacttgaaggaaagcttgacctgaagcgcctggagtctgccgcgcaaatgctgatcaagcgccatgaagcgttccgcacgacgtttgaaatcaggaacggcgaacctgttcagcggatttgggaagctgcggaattgaccattgatgtcatcgatgcagatgaacaagaagcggaaaagctgattaaagagttcatcaggccgtttgatttaacaaaggctccgttatttagaatgagcatcatacgtgtcacggaagaaaaacatcttttgcttgtcgatatgcatcatatcatttcagacggcgcttccgtcagcgtgctgatcgatgagatgacaaggctttatgcgggagaggcgcttgaaccgctgaggattcagtataaagactatgctgtatggcagcagcacttgctcactgaacggcacaaaatgcaggaggaatactggctcaaggagcttgacggcgaactgcctgttttgacgctcccgacagactatccgcgtccttctgttcaaacgtttgaaggaagccgtatcagcttttctctgaaaccggagcttgtccagcagctcagaagactggccaaggaaacggaaagcactttatacatggtgctcgctgcctcatacagtacgtttttatcgaaactgagcggacagagcgaggtcattttcggctctccggctgccgggcggccgcatgcagatttgagccgtatcatcggcatgtttgtcaatacgcttgcgataagaacgcgtcctgaaggagacaagccgttttctgcattccttgaggaagtaaaagaaacgacgctcggcgcatttgagcatcaagattacccgtttgaagaactgatcgagaagctgaacatccagcgcgacatgagccgaaacccgttatttgatgccgtcttttcaatgcaaaatgccgatttgaaagacttgtcaatggaaggagtcacacttaaaccgtatgattttgcccatcagactgcgaaatttgatctgacgttgacagcggcggaagaagacggacttctcgtttttgaaatggaatacaatacagctctctttaagcgcgaatcgatcaaacgctggagcgggtactgggtcaacctgctcgaagcggttgccgaaaccccggatgcaagtctttcagacctttcgcttctggatgaagcggaaaaacggcggatcgtccaaaagtggaatgagacgaagctcgctgtgccgcaggacaaaacagtccatgagctgttcgaagcgcaagtcctccgcacgcctgaccgcggggcagcggtgtacaacggcgtgcagtggacgtacaaagagctgaatgcgcgcgccaaccgtctggcccggctgctgatcgaaaaaggggccggccctgaacagcgggttgggatcatggtgaagccttcgctggaaatggcggccggcgtacttgcgattttgaaagcgggagcggcctatgtaccgatcgatcccggctatccggccgagcggatcggatacgtactgaaagacagcggtgcagaactgcttctgacgcaaacaaacttagccgtacctgaagaattcagcggtgaaacgcttcttctcgattcgatgctgagcgaagaaatcacaaatgatgatgaagtgaacccgcaggcaggtacacagccaaacaacctggcatacttgatttacacatcgggcacgacaggccagccgaaaggcgtcatggtcgaacatcaatcgctcgtgaacttgtgctattggcataacgatgcattcgcggtcaccgaacaggacaaaagcgcgaaatatgccggcttcggctttgacgcttccgtctgggagatgttcccgtactggatcgccggagcggagcttcatatcattgatgaagcgatccggatggacattacgcgtttgaatgaatatttcgaagagaacggaataacgatcacgttcctgccgacacagctgtgcgaacagttcatggagctcgacaaccagtcgctgcgcgtgctgcttactggcggagacaagctgaagcggatcgaaaaacggaactacacgctcgtcaacaactatgggccgacggaaaacacagtcgttgcgacgagcacggcaatcgatcctgatgaaggcatgctttcgatcggaaagccgattgccaatacgcgggcgtatgtgcttggacaaaacaacgaagttcagcctgtcggcgtcgctggcgagctgtgcatcgccggccgcgggcttgcgcgcggctatctgaacaagccggaggaaacggcgaagcgttttacggaaggcccgtttgtgccgggcgagcgcatgtaccggacaggggatgcggtcaaatggctggaagacgggcggcttgagtacatcggccggatcgaccagcaggtgaaaatccgcggcttccggatcgagctttctgaaattgaagtccagctcgcgcggctctctgaagttcaggaagcagtcgtcaccgacatcgaagacgcctacggcaacaaagcgctgtgcggctatgtcgttgcggacgaacagcttgatacagaaagcctcgcccgtaagctggggcagacgcttccggactacatggtaccggcgtattgggtgcagcttgatgagcttccggttacggcgaacggaaaagtcgaccgaagggcgctgcctcagcctgacgtcgaagcgcagacagccgaatacaaagcgccgcgcacagaaacggaacagctgttggcggacatttggcaggatgttctcggcatagaccgaatcggagtcacggacaatttcttcgcgctcggcggggactcgatcaaaggaattcaaatggcaagccggcttcagcagcacgggtggaagctggagatgaaggacttgtttcagcacccgacgatcggggagctcagttcttatgttcaagccgctgacgctaaaccgatcgatcaaggccctgtcgaaggcgaagtcacactgacgccgatccagcgctggttctttgagcgcaaatttacgaacgagcatcattggaaccaatcagttatgcttcacgctttatcaggattcgacccggaagcggcaggcaaggctttaaccaagctgatcgaacaccatgatgcacttcgcatggtttatcagcgaaatggagacgggattgttcagtacaacagagggctggaagaaacagcggttcgtcctgaagtcatccgcttcaatgaatcgggtgctgaacttgaagctgccgtgttaaaggaatcaaaccggattcaaagcagtatcaatttaaccgaaggcccgcttttgaaagcggcgatctttgagacggatcaaggcgatcatcttctcatcgtcattcatcatctcgttgtggacggaatttcatggagaatcctccttgaggatttcgccgccgggtacgcccaagctgaaaaaggggagccgatcattcttcaagaaaagacgcactcttttgctgaatatgcggctcgcctgaaagaatacgcaaggtcaaaagctttcgcgaaagaaatcggctattggcaggaagtcgagaaggcggagacggcatcgctccctaaagatgatgaagcagaggacaaacggatgcaccatacgaaaacggctgagttttctctctcgaaagaagaaacagaacagttgatgacaaaagttcatgaagcatataacacggaaatgaacgacattttgcttacggcgttgggcttggcgctgaaagagtggaccgggcaggaagactttatcatctgcttggagggacacggccgggaggacatcatggaaggcttgaatatttcccggacggtcggctggtttacaagccagttcccggcgctgattcaactgcgccattccgaagatatcggctatcaaatcaaacagatcaaagaagagttgcgccacattccgaataaaggaatcggctatggcatttatcgctatttgaccgaagaaggcaaaaaggcgcagccgatcaagcatgatatcagctttaactatttgggccagtttgcagagatggcggattcgggtctgttcacgagatcagctttgtcgtccggcgatccgctcagcccggaaacggaaaaaccgaatgcgctagacatcgtcggctatatcgaaaacggcattttgacaatgtcaattgcctatcattcactcgaatacaaagaaagcaccgtcgccgctgtcgctgaaagctttaaaacttatttgctgcaattgatcgatcattgcttagagcgggatggaggcgaactcaccccgagcgatcttggagatgacgaactaacgcttgaagaattagataaactgatggaaattttctaacaaaaaaacgaggtgccttatggggaaagaaaagattcaaaaggtgtatcctttgacaccgatgcaggaaggaatgctgtaccacgcaatgcttgatccggaatcttcctcttacttcacacagctggagcttgtcatagacggggaatttgatttggggatctttgaaaaaagcgtgaatcagctcgtgcgttcatacgatattctcagaacggtttttgttcatcagcaattgcaaaaaccgcgccaggttgtcctggctgaacggcaggcaatagtggaatttgaggatcttgcggacttggatgaaggaaggcaaaaaacccgcattgaccagtataaacaagatgtacaggcggccgggtttaatttggcgaaagacatgctttttaaaacggcggtctttcggcttgaccggaaaaagcaccatctcgtctggagcaaccatcatatcgtgatggacggctggagcatggggatattgatgaaacgcctttttcaaaactatgaagcgtttcgagcaaaccggacggttacgcttgatcagggaaaaccttatgcggactatattaaatggctcggcagacaggataaggatgaagcggcatcctactgggaacaccgcctttcgggtttagaaagcccaagcgtcattcccggcggaaaaacgcagccggattcaggatcgtaccggaacgaggagttcacgttcgtttgggacaaagacatggtggatgctcttctaaagacggcaaaccgctatcatgtcacagctcccaacctttttcaggcgatttggggagcagtgcttgccaaatataacagaacagatgatgtggtgttcggcacagtggtgtccgggcgcccgtcggaaattgacggaatcgaacatatggcagggctgttcatcaacacgatccccgtccgtttaaagatcgataaaaacgcatcgtttgcagagctgtttaaacaagcacagcagcatgcaattgacgcggaacggtacgactatgtcccgctatatgagattcagaagcaatcggcattggccggccgcttgatcagccaccttgtcgcgtttgagaactatccgcttgataaagagcttgaaaacggaacgatccatgagcggctcggcttttccatcaaggctgccggagcttttgaacaaacgaattacgactttaacttgatcgtttatccgggagcggagtggacgatcaaattgaaatacaacggcgcggcttttgacgcggctttcattgagcaggccgccggacatttaacgagactggcagaagaggcgattgcaaatcccgaatcaaaagcagtcagcgccagcatgttatcaaaacaggagcaacaaacactgctcgcttttaatcaaacgaaaaccggttatccaaaagaaaagacgattccggagctgtttgaagaacaagttgaagcctctcctgacaaaacggctgttgccgcagacggaagaagcctgacttaccgcaggctgaatgagaaagccaatcagctcgcgcgaaagctgaaggcaaaaggcctgatgcacggaaatgctgccgccattttgatggagcggtctcttgaagcagccgtcagcatgctggcagtgctgaaagcaggcggcgtgtacgtgccgatcgatcccgaatatcctgaagagcggattcgcttcttgctcgaagacagcggagcaaagatcgtccttacaaaagacagcccgcagatttcactggaagggtatgaggtactcgccgcaaatgcggtggatgcagaaaaagaagacaccgccaaccttgtacatgccaacaaacccgaagatcttgcctattacatttatacatccggatcgacgggcaagccgaagggcgtgatggtcgaacaccgcaatatcgtccgccttgtcaaaaatgcgggctacatcccgctgaagagcgacgtgaagatggcgcagacgggggctgtcagctttgacgccagtacatttgaagtgttcggcgcactgctaaacgggggaaccctttatcccgtcccgaaagagacgctccttgatggaaagcggttcagagttctcctggaagagaccggaatcacaacaatgtggctgacttcgcctctttttaatcagctcgcccagcaggatccgggaatgtttgcaaccctaagtgatctgattatcggcggagatgcccttgttcctggaatcgtcaacagagttaaacgcgaatcgccggaactctcgctttggaatggatacggacctactgaaaatacaacattttcgacgtgttttttcatcgatcaagcatatgagagaacgatcccgattggaaagccgatcggaaattcaaccgcctatatcgttgatgaacacggcgcgcttcagccgatcggcgtgcccggcgagctgtgtgtcggcggagacggggtggcccgcggctacttgaaccagcctgagctgacagatgaaaagtttgtcggcgatccttttgccgaagggaagcggatgtaccgcacgggcgacttggcaaaatggcttcccgacgggaatatcgaatttctcgggcggatcgatcatcaagtgaaggttcgcggcttccggatcgaattaggcgaggttgaagcggctttggcccgccttgagggaatttcagaagcggctgctgtcattcgggaaaacaataccggagaaaccgagatttgcgcctactacactgcagttggcgcgaggccgcccgcacagctgcggacagagctgtcccggtcgcttccggagtatatgattccggctcatttgatcgaactcgacagcatgccgctgacagccaacggaaaggttgacaaacggcagctgccggctcctatcgctgaagagactgacagattcgaagcgccgaaaaatgaaacggagaaaattctggcggcaatctgggaagagattctcggcatcaagcagccgggaatcgatgacaacttcttttctatcggcggacactcgctgaaggcgatgatgctgacagccaaaatacaagagcagctccaaaaagaagtgccgatcaaagtattgtttgaaaaaccgacgatcagagagctggccgaatttcttcaaggggaaacgaaagagaaaaccgctccgattgcgccggcgccgtcccgtgcgaattatccggtgtcatccgcccaacggcgtatgtacatcctcaatcagctcgaagaagcaagcacgagctacaatgtgccggcggttctgcttctggaaggcgaattggataaggagcgtctggaagacgcgtttcgggccttgatcagccgccatgaaacattgcggacatcgttcgaattaatcgatggagaaatcgttcaaaccatccatcaagacgcagtttttcacctgacggaatcagtggcggatgaagcggaagccgaagcggcgatcagagggtttatccggccgtttcagctgaataaggcgccgctcgtccgggcggaactcgtaaagcttgaagaaaagcgccatctgctgatgatcgatatgcaccacattattacggacggaagctccaccggcatattgattcgcgacctggccagcttctaccacggtgaagaggcgcctgctcctaagctccactataaggatttcgctgtgtggcaaaacgggccggagcatcaggagaaattgaaagaacaggaacagtattggctcgatattttcaaaggcgagctgcctgttctcgatctgccgtacgattttccgcggccttcaaaacgcagctttgaaggcgaccgtgtcgtctttggaatcaatcgaaaactgacggcagacgttcaaaagctgctttctgaagccgatgcgacactttatatgttcctgttggccgcgtttaatattttgctgtccaagtatgcgtctcaggaagatttaatcgtcggatcgcctgtggccggcagaacccatccggatctgcacaacattccgggcatgtttgtcaatacgctggcgctccgcaatcgtcccgaaggggaaaaaacgtttaaggaatttttgcaggaagtcaaagagacaagtcttcagggctttgccaagcaggactatccgcttgaagaactgattgaaaaactgccattgctgcgggatacaagccggaatccgctgttcagcgtctttttcaacatgcagaacatggaaatcccgacgctgaaactcggagatttgcagatttcgtcttactcggtgcgccatcgcacagcgaagtttgatctgtcgcttgaggccgtggagcatgatggggaaatcggtttgagctttgactatgccgtatccttatttaaagaagaaacgatcaggcgctggagcggccacttcttaaatgtgattaaaacaatctgcgaaaatcccggcattaagctccgggacatcgaactgctttcagacaaagagcgcggacttctcctggaagaagtgaggcgcagccgggcagaacgcctagaggagcggccgtttcatgtacggtttgaagaaaaggcggccgaaatgcctgatcagccggctgttgtctgcggggaaacaatcctcacataccgcgggctagatgaaagagcaaatcaaattgcaaatgtgctgcgaagtgaaggcatcggaaaagacgacgttgtcggcattatgctggatcgttctgcagaggtcgccgcggcaattctcggcgtaatgaaatcagggggcgcttttttgccgattgatccggaaatgccgacgagcaggattcaatatatgctggaagacagcaaagcccgctggctcttaacagaacattcccatcaagctgctctcgcagattggtataacgggagattgatagatgtgagaaacgacacgctgatggcaagcaaaaaacgaccgcatctaatccatgacggggcgagtctggcgtacatcatctatacatccggaacgacgggtcagccgaaaggcgttcagctggaacaccgcaatctggcaaactatgtttcctggtttatcagtgaggcgcgcctgtcagcttcggataaaacgatgcttttgtcttcctatgcgttcgatctcggctacacgagccttttcccggtgctgctcgccggaggagagctccatatcgtcccgaaagaaacgtatacagaaccggagacatttattcattatatcggtgaacaagggatcacatatatcaagctgacgccgtcgctgttccatacggtcgttcagccgcaaagcttcgctttggcaaaggggcttcagtcattgagactgattgtactagggggagaaaaaatcaatccgaaagatgtcgaacggttccattcccgctatccggacacccggttcatcaatcattacgggccgacggaaacgacgatcggtgccatcgctaaaccggtcgaaccgggcatgatccggcaattcgccgagcgcccgacgattggacggccgatttcgggcgccggagcactggtattggacgcttcccgccggcttgttcccgcgggagcggcaggcgagctgtatattacgggaagcgggcttgcaagaggatatgtgaacaaccgggaacttacggctgcgaagtttatcgaaaatccttacacaccgggcacattcatgtaccggacgggggatctcgtccgccgtcttccgaatggggagattgaatttttagggcggacggatgatcaggtgaaaatccgcggctacagaatcgaattgaaagaaattgaagaggccttcattggacttgaacatatagagagagcggtcgttctttcatttacggctgactcagggctagacgaactgtgcgcttatattcaagcgaaacgacagctgccggtttccgaactgagagagcgtctttctgagcggcttccgtcgtacatgatcccgtcatatttcgtaacggtggataaaatgccgcttgcggcgaacggaaaagtggaccgcagcgcgctgccggagccgcaaggtctaagtggtcaaagcgattcatatagagcgccgtcaaccgaatttgaaaaagccctctgcggcatttgggaggaggtgcttggcgttcggccggtcggacttgacgacaatttcttcgatcttggcggacattcattaaaaggaatgatgctgacagcggaaatccaatccaagctcggaaaaaaagtaccgttaaaaacgttgttcgattgtccgacagccggcttgctcgcccgcagtatcgaagccgatggacaggcagaacaaagcgggattcagcctgccgaaaaacgcgactggtatcccgtttcatccgctcagcaacggatgtatgccctccatcatattgaaaagaacggaacgggctacaacatgccgtctgttctcatgctggaaggcgtacttgatacggatcgcttaagacgggcattcgcagacttggtgaaccgccatgaatcattgcggaccgcattcgttgaaatcgatggccgcaccgttcaaattgtgcatgaaaaagcggacattgacttaaaggttattcatattcatgaagaggacgcagaagcacagatcaaccgctttatcagaccatttgatctcagcaccgctccgctgatcagagccgagctgctctccatcagctctgcgcgccatctgcttttgattgatacgcatcatattattgcggacggcgtttccagaagccttttcgtcaaagaaattgcacagctttataaaggcgcttcgctccctgaaccgaagctgcattataaagattatgcggtatggcagcaacaacctgaccagcaagaaaacattcggaaacaggaagacttctggctccggcagtttaaggaaaccgttccggaactcagccttccgctcgactttccgcgtcctcctgtccaaagctttgccggggaccgggttcactttaaagtatcaaaaggcaccgcccttaaaatccgccgtttgatggcgaaaacgaacacgacgctgaatattgtaatgctcgccgtttttaatctgtttttaagccgtcttgccggccaaaaggatattgtcgtcggctcagcggcagcgggcagaacgaatgctgatttgaaagacgtgccggggatgttcgtcaactcgttggcgctgaaaaaccatgtacctgatcaagcatcattcagcgggtttttggaagaggtgaaaaacaacagcctcgcagccctcgaccatcaggactatccgtttgaagagctgattgccaagcttgatttgccgcgcgatatgagccggaatccgctgttcaatgtcatgctgacaacggaagatcctgataaagaaacgctcgatttagacggtctgataatcaagccgtatgagacttcacatgccgctgccaagttcgacctgacactgggggcttttgaaaaagatgatgaaatcggtcttcagttcgaatatgcaacagatttatttaaaaaacaaacgattgaacgctggagcggatatttgcttaacctgctcgaagcgattgccgaaaacccggatgcaagcctttcagacctttcgcttctggatgaagccgataaacggcggatcttgtacgaatggaacgaaacagttctcgacgtgccgcagaacaaaacagtccatgagctgttcgaagcgcaagtcctccgcacgcctgaccgcggggcagcggtgtacaacggcgtgcagtggacgtacaaagagctgaatgcgcgcgccaaccgtctggcccggctgctgatcgaaaaaggggccggccctgaacagcgggttgggatcatggtgaagccttcgctggaaatggcggccggcgtgctcgcgattttgaaagcgggagcggcctatgtaccgatcgaccccggctatccggccgagcggatcggatacgtactgaaagacagcggtgcagaactgcttctgacgcaaagcggattaacgatgccggacgcatttaccggagaagtgatcgatttgaatagagaagcctccattctggccggcgagctttatcccgaggatgacatcaatccaagcgcagaggctcagtctgacaacctggcatacttgatttacacatcgggcacgacaggccagccgaaaggcgtcatggtcgaacatcaatcgctcgtgaacttgtgctattggcataacgatgcattcacggtcaccgaacaggacaaaagcgcgaaatatgccggcttcggctttgacgcttccgtctgggagatgttcccgtactggatcgccggagcggagcttcatatcatcgatgaagcgatccggatggacattacgcgtttgaatgaatatttcgaagagaacgggattacgatcacgttcctgccgacacagctgtgcgaacagttcatggagctcgacaaccagtcgctgcgcgtgctgcttactggcggagacaagctgaagcggatcgaaaaacggaactacacgctcgtcaacaactatgggccgacggaaaacacagtcgttgcgacgagcacggcaatcgatcctgatgaaggcatgctttcgatcggaaagccgattgccaatacgcgggcgtatgtgcttggacaaaacaacgaagttcagcctgtcggcgtcgctggcgagctgtgcatcgccggccgcgggcttgcgcgcggctatctgaacaagccggaggaaacggcgaagcgttttacggaaggcccgtttgtgccgggcgagcgcatgtaccggacaggggatgcggtcaaatggctggaagacgggcggcttgagtacatcggccggatcgaccagcaggtgaaaatccgcggcttccggatcgagctttctgaaattgaagtccagctcgcgcggctctctgaagttcaggaagcagtcgtcaccgacatcgaagacgcctacggcaacaaagcgctgtgcggctatgtcgttgcggacgaacagcttgatacagaaagcctcgcccgtaagctggggcagacgcttccggactacatggtaccggcgtattgggtgcagcttgatgagcttccggttacggcgaacggaaaagtcgaccgaagggcgctgcctcagcctgacgtcgaagcgcagacagccgaatacaaagcgccgcgcacagaaacggaacagctgttggcagacatttggcaggatgttctcggcatagaccgaatcggagtcacggacaatttcttcgcgctcggcggggactcgatcaaaggaattcaaatggcaagccgccttcagcagcacgggtggaagctggagatgaaggacttgtttcagcacccgacgatcggggagctcagttcttatgttcaagccgctgacgctaaaccgatcgatcaaggccctgtcgaaggcgaagtcacactgacgccgatccagcgctggttcttcgaacggaaatttacgaacgagcatcactggaatcagtcggtcatgcttcacgccccttcagggtttgacccggagctcgtcgaacagacattggcggcattgacagagcatcatgatgcacttcgcatggtttatcaaaagaataacggccgcctcattcaatataaccgcgggccggatgaccgttcgttcgcctttcgagtggttgacctgcgatatgtcaccgacattgaaacggaaatagccgctcaagcaaaccgccttcaggcaagccttgatcttgaaaacgggccgcttgtaaaggctgaacagtatcagactgcggaaggcgaccatttgctgatcgtcattcaccatttggtgatcgacggcgtgtcatggcggattctgctggaagactttgcatcaggctattcgcaggccgcacagcagcatgatgttgttttccctgataaaaccaattcgtttaaagactgggccgaagcgcttgaggcttatgcgcaaaccgaacgcttccttaaaacggccgattattggcgcagacttgaacaagagcgtatttgtgagctgccgaaagatcgtgctgccgcagaaagaaaagcggaaaacacctctgctgttaagtttgaattaagcgaagcggagactcgtctgctgctgacgaaagtgcatgagccgtatggaacggatatcaacgatatcctgctttccgctctcagcctgacgatcagggaatggacgaacggctccaatatttgcatcaatatggaaggccacggcagggaggaaatcattccagggatgaacatttcgagaacgacggggtggtttaccgcacaatatccagttgttttaaaaagccaagcagcggcagggttgcctgagaccattaaaaacgtcaaagaaaccctccggcgcattcctgacaaaggaatcggctacggcatccttcgctacttaacagaccggaaaaaagccggtgcaattttctcgatcaagcctgacatcagctttaactacctgggacagatcgacagggaggtgcagaccggcttctttgggccttctccttatgatatgggaagacaggtctctgaaaggtctgaagcactctatgcactgagcttcagcggcatcatcagcaaggaaaaattcatcttgtcatgttcattcaatacagaggaatatgacaggcagaccatacaggagctcatggacagattcaaagctttcctgacagcattgatcgaccattgtacagctaaagaagaacgcgaatttacaccgagtgatttttctgccggcgatcttgagatggaagaaatgggcgacctgtttgacgttcttgaagaaaacttgaaataaccaccgaggacttgcccgcttgtcaagcgggcgagcctatgaaagggggatacgatcttgagccagtttaaaaaagaacatgtccaagacatatactatttgtcaccgatgcaggaagggatgctgtttcatacgctgctgcatccggggcaaggcttttatattgaacaaatcagcatgcaggtgaaaggctcttttcaaaaggatgtattggaaaaaagcatgaatgtcatcatcggcaggtatgatatattccgaaccgttttcgttcatgaaaaaatgaaacgtccggttcaagtcgttttaaaggaaaggtcatttcaggcagaagaaattgatctatcaggactttctgaagcagaacaaaatgagagaattgaagattataaacgaaaagataaagaaaaaggatttaacctctcaaaagacattccgatgagaacggcggtttttaagaaggggcaggatcgttacgaatgggtgtggagctatcatcatattctgcttgacggatggtgcttcggcattgtcgtacaggagctgttcgaagtatacaacgcgctccgtgaaaacaggccatacagcctcgggcctgtcagaccttacaaagaatatattaaatggctcgaaagccaggacaaacaaaaatcgctggtctactgggaacatcatttagccggattcgaagggcagacgacattcagcgaacagcggaaaaacccggagcaagccggcaatcagccggaagaactgctgtttacacttccaaaagaagatacagaagcgttcacacagctagcaaaagcgcatcataccacgttgagcacggcgcttcaggcggtgtggtcggtgctgctcagccgctatcagcgatcccgcaatctgatcttcggtacagttgtttcaggccgccccgctgacattcaaggtgtcgagcacatggtcggtttgtttatcaatgtcgtcccgaaacgggcgacctttggcccgcaaacgacctttacggagctggtcgctgatttgcagaagcaggcgctcgaagctgaaccgcatcaatatgtgccgctctatgaaattcaaagtcatatagcagcgccgaacttaatcgaccatattatcgtttttgaaaattacccgctgcaagaagccaataaacagcagaaagaaaaaaatctcggcttcacaatggacgagatcagcgtttttgaaaaatcgaattatgatctgaatttgcttgcttcaccgggtgaagaaatgatgctgaaacttgcatacaaccggaatatattcgaaccatctttcatcttgcggttaaaagaacagcttttgacagccattcgcgaggtcatcagagatccggagcagccgcttgacgacatttgtgtcgtttccaaaaaggaaaaagagcgacttctccatgaatttaacggtcaagtccaacggaagcaaatcggcctgacgattccccaatggtttgagcaatacgctgaagcgctcccggaaaagcccgcggtatcagcggccgggcggacgctgacatatcgggaattgaacgaaaaggcgaacaaggtcgcgcaccttttgcgcaaaaagaacgtcggccgcggcgagcccgtcgcccttttgttccgccgttcgccggaaatggtcatcgcgatactcgccgtcttaaaagcagggggcgcctatctgccgattgacccggaatatcctgaagcacggattcagtatatgctggaagacagcggggctgtttgcatgctgacacaggaagagcttgccggccgggcggcgtcgctttcttttcataagcatacgatcctgatcgacgatcctgctgtgtctgcagaaagcgggagaaacctcgaaatcgccgccgagccggacgaccttgcttatatcatgtatacgtctggtacaacgggaaaaccgaaaggcaatctgacgacacatgccaatattacaagggttgtaaaagagacaaactacatcagcctttccgagaaagacaccttgctgtccctttcaaactatgcgtttgacggcttcacatttgatctgtacggcgcgctgttaaacggagcaaagctggtggtggccgatcaggcgacgattctccatatcggcaagctgacagaagcgattcagaaggaaaacatcacagtcatgtttgtgacaacggcgctgttcaacttgctggttgatgcgggaacagggtggatgaaagggattcgcaaagtcctgttcggcggagagcgctcatctgtcagccatgtcaagaaagcatttgctgccatgggaccggacaggatcatccatgtatacgggccgacggaaacgaccgtcttcgcgacgttctatccggtcaaccgtatggaagacagcgcggtttccattccgatcggcaagccgataaacgaaacgaatgcatacatcctgacggaaaataaccggcttcagccgattggagcggtgggtgaattgtgtctgagcggtacaggagtatcgcgcggctatttgaacaggccggaactgactgcggaaaaattcgcgccgcatccgtttaacagcggtgaaacgatgtacaggacgggagatctggcccgctggctgccggacggcaatatcgacttcatcgggcggatcgatgatcaagtgaaaatccgcggacaccggattgagctcggtgaaatcgaagagcagctgatgcgctgccaaggcgtaaaggaagccgttgtaaccgccaggaaaagcgggaacggggatgcggcgctcaccgcttatgtcgtcccggtgcagggaactgaggttgcaaacgaggaggttcgccgccaattggcgcggaggctaccggcttacatggtgccggctgcgtatatcatgcttgaagagctgccgcttaccgctaacggaaaagtcaaccgacgccttctccctgaagccgatggccggccgaattcaacagagcgccgtgcaccccgcaatgctacggaagaaaagcttgcagtgatttggtctgaggttctcggcagacagcagatcggaatagacgagaacttttttgaaatcgggggacattcattgaaagccatggccgtcgcctcccggatgctgaaagatctcgcaatcgatgttccggtgaatgtgttgtttgaaatgcccacaatcgagggcctcgcggcttatatcgaccaaggcggccatgtggatgaagtgaaaaaaaccgtcttcaatcaggcaagcacccgccatttgttcgctttcccgcctgtcctcggatacggcatcatgtacggcaagctggccgaacaaatgccggaatacaggattcacgcgttcgactttatagaaagcgatgaccgcgctgtgcgctatgcagaagccatctccgaccttcagcctgaagggccgctgacattgatcggctattcagccggctgcggacttgcctttgaagtggcgcaagcgctcgaaaagaacggacggaaggtcgaaaagctgctgatgatcgactcatatatgaagaacgatgtcagcgatttagaagggcggtcaattgaagccgatacggccgccttgatggaagccaacaaggacaatgaatatatgaaaatcaagacggttgccgatggcatcgccaaaaagatgacagcctattattcttactttgtcaatcttgtccatcaaggaacggtcagctcggagattcatttgatcaaatcagagcacgcaaaaccgctcccggcatggctttcgttgtggaaagaaggaacggagtcttcatatgatgaatatcaaggcgctggaagacatgatgaaatgcttgcggacggctttgttaaaagcaacgcagatctcatcagacagattttgggcgaacgtgccgctgtaatcggaggtgcatgatgcatgaacgagatcattaagcagtttggagcgccggcaagcggtatgcagttgatctgtttcccgtttgccgggggatattcggcatcattcagaccgcttcacgaacatttaaaaacagattttgatatgctggcgatcgaaccgcctggacacggcacaaatcgaatggcgcttgtcgacaatttggaaaagctcgccgatttgtatatagcggcgcttaagccgcggctttcctctcaattcgtgctgttcggccacagtatgggcggcatggttgtttacaggctggcgcaaaagcttgaacaagaagggatctttgcggcagccgctgtgatatcagcgatacagccgccccatattcagcggcaaaaggtgtctcaccaaaaggatgacgcatttctcgaccatctcattcagcttggcggaatacccaaagaactggcagagcacagggaaatgatgaactttttcctgccttcgttcagagcggactacagagcgcttgagacgttctgccataccgatcatacgccgcttagatcgcctgtgcatattctgaacggagaccgcgatgagaaatgcatgagggatgcgcttggctggaaaaagtgggcgaatacgatcgatttccactatttcaaaggcggacatatgtatcttttatcagaaacggaacaagtagccgccaagttgaaaacgattgccgcggccagccgcagtacggctgttccgacaatgtaaagaaagcggaaaatcggtgtgctgcagctgccgattttccgttttttcagctttttttcagccgattttcccgccgaaccatcgtcgccccaataattccggcaatgatcatccccgttccggcgaagtgaaaccattcgagtgattctcccagccatataatccccgccaaaatcgtcaccagtgtcgccaagtgattaaacatgctgattttcgcagcttctatttttgacagtgcataatttgataaaaatgatgtcgcaaacgatgacaacacgcctaaatacaataccgaaagaacaaacaccggatcagtgaagggggcaaaaaatccgctcagcgtgccgtctgacatatggctgattccggcgatgccgttgaaaaaaagaaatcccgctcccgttgtgacatatgttaattcaagcgagctgaaggttcgcgtcatctttctggcgagcacgctgtagcccgccgatgaaagcgccgaaagcaaaatcagcgccgcccctcttaaatcggaacttccggtgcctgcacttttcatcataaagatgcaggccacccccgccgctgacaagacggtaaaaaagaattgccgtttcgtaaaccgctcatttaaaaaataagcggcgaatatcatggtgaaaatcgggatcgccgcttgaatgattccggcttcagacgaagacgtgtagacgagcccgaaaacttgaaaagcaaaaaacatgacagggtaaaataatgctaaaggcagcactttcagtgcgtcttttatgctgatggcgatcttcacccatccgagcagaaggggaataagcgcagccaaaaaagcgaccgtaaagcgatgggccagaatgtcgaccggactcgctgcagtgagagccaatttgacaaagaaaaaggaaaatccaatgataaaagcatagagcaaagctgccgcataagcagatttgttcaaagtcgatcatctccgttaaagtatgcatgcaatacagatattttaccggcttctgtcatcttatacggaagcgaaatctgatacaatacaaaaaaacggaatctgtaccgttacagattggcgaaggagacgaacatgcacaaatatgtcgcactgatgaacgaattggaggatatgatcgaagacaaatcctttcaggaaggggacaggctgccttccatccgcgcgctggccatacgtttcaaggtaagcaaaagcacggtcatcagggcgttgaacgagctggaaagacggcacctcatctattcagtgccgaaaagcggctattacgtcgtgaaaaaaacgaatcagcggcccaactccggaaaggctgtaatcgatttcgcagcatccgctcctgatccggatgtttttccatacatcgattttcagcattgcatcaataaagccatcgatacatacaaaaacgatctgtttatttatgggacgccgaaaggtctcccgtcgttaatccaagccgttcagaaagagctcgcaaacagccaggtgtttgcaaaagaggaacacatatttattacatcaggcgtccagcaggccctcgccttgctcgcttcaatgccttttccaaaccggaagcggaaagttctgatcgaacagccgagctatcatttattgattaaataccttgaagttcacggcatccccgcggtcggcatcgagagaaccgccgaaggcatcgatatggacgagctggagcgcatctttcaaaccgaagatatcaaatttttttatacgatgccgagattccacaatccgctcgggacatcctacacggaacgggaaaaaacggccatcgtcaagctggcggagaaatatgacgtctatattgccgaggatgattttttaggagatttggagaatgataaaaaggcggatccgttacattactatgacgtttcttcccacgttatttatttgaaaagtttctcaaagattatttttccgggtctgcgggtcggagccgccgtgctgcccgattctctgacaattgtgttcaaccggtacaaacagctgctcgacattgacagttccatgctgtctcaggccgctttggagatctatttgaagagcgggatgtttgaaaagcataagcaaaagatccgttcttcctatcaaaaaagatcatgccttctgcatgatctgctaaaagaatgttccgcgtctctaggggatgtgtttgaatttcatcctcccgcacagccggctatccacacccatattgaattggaccggacgatcccggcataccgtctgattaaaagcctacaaaaacgggacgtcctgctcgaaccggtcaacgctcattatatgccggcttttccaaaaagaaatctattgaaaatcaatacgtccaatgtgaaggaagaggacatccgcagcggcatcgagcggttgcggcaagcggtggaaaccgcttatttttagggcgggactttttaaagcattgacagttcagcgcagcttttcatcacaatccggccgggaaattcaggtgcggcggaacacaccgccattttatagccggggtcaatttcataggcttgtatatagcaaggcggatagccggggggagtttccaccgaagctcgcccctgttcgttcagtttgacggagaaggaatcaagcggcagagacaggccttttcccgcctgtttaataaagctttctttcatcgtccacaaatgatagaaatacgacaggcgttctgattcgtccttttccatgagatcatcgtgctcggaaggtgaaaaaaaccgtttggcaatgtcgaaattgatcggcttgatcttttcgacatccactccgatcggctgcgcgccggctccgcacacgatccattttccggagtgggaaatgttgaaatgaaagtcgttcagaccttcagcagccggtttgccgtaccttccttctgtaaaacggatctgctcattcggcaaatgaaacgtttcgctgatgatgtgcctcgccagcacttctccgatcagcgtccggctggcatcttcgggatatctgtatctgcccactttttttcgcttttcttcagacaccatggccatcattcggttaaattgaccggcttccggcagctgatccatataaacggcgtaaatcttcatcaaacgcaacctcttcacatgatatttttctgctttcattttagcaaacagacagcaggaaagataggcatgatacttgtgcagaatggagtaatgaacatgatagacggaacattgataaaagatacatgcttcgggagggagcttttgatctatcttcctccttcatacgggagcggtgaaaaccgctatcccgttctatacgtccatgacctgggagatttattcgatccggcatacagcaacagtctgcgctcaatcgaaaagctgttttcgagtcaggaagtgccggaattgctgctggtcggagtggctccaaaagatagggaaagcgaatacacgccttttcccaagcggcatttgctgccgaataaacgggagtacggcgggaagggcaacgaatatgccgcttttttggccaatcggctcaagcctcatatcgaccggcactaccgaacaaatccgagccgtgaacaaacaggaatcatcggaaagtcgttcggagggttgatctcggtttacacagcttttctagcatcggagacctttggaaaaatcggatctttgtcaggttctttctggtttgaaggaataaccgagtttatgaagaataaccgctttgagaataagcatctgcgcatttatatggatgtcggaagcacggaagggacagacagggataatctgcagaaagagatgataccgaggacaaaggaagccttcagcctgttaacagaaagcgccgcctccgaaaaagaactgaaatttgtcattgatgaaggtggctcacatcggcttgagcggtttgcgaagcgttttccggaagccgttaaatggctgtttggctcctgtcacaacagcgcacggaatggcaggagtttctgattggcatgaagtatcgttgtaaacgagaggcgcggaagcaatggacattctgaatcgtttggctgaaaaacatcgattatattgaaaagcactggatcagccgctgaaacacgaagacatcgccaaaatcgcatattgttcgaaatttcattatcagcggatgatctacatgctgacgggtgtcacctttgccgattacattcggaaaagaaggctgacagccgccgcgcaggagctgactgcaagtggttgatgctgcttttaaatacggctacagcacaccgcaatcattatcgggaggccttcagccgccttcacggcatcagcccttcacaggcccgagaaaaaggcggacgctcagggcatttccacgtctatcctttcatattcaaataaagggagtggaggatatggattacaagattgttgaaaaagaaccgtttcaggtgatcggcaaagcgttggaggttacggtcaaggatggtcaaaacaaaaaggatattccggctttttggaacgaattaaatcacaacggctttaccgattctttaaaaccgcacatcggcccgcttggcttccttggcgtctgcatggattttaacgatcaacccgatacgttcaatttttgaaaaaaataccgcttacacgcctgccggctgtgtcgaaaaaacgattcccgccgcaacttgggccgtctttgaggccatcggccccgtcaatccggctggtcaagccacatgggaaaggatcttctcagaatgttttccggcgactggctatgaactggcgaacgagccgcaatttgaagcctatcctgaggacggggatattatggcgcaagatcatatcaccgaaatttggataccggtggtaagcagaaataatcctgaacgagaaaaacggatgaaacgctcatccgttttttttcagcgacatatgtacaggcttggcagctctgatgcgccttcctgccattgctgcttttaaaagctgtttggactgcggcaaagaaaaccgcaaaatcaggccggttaaaatggcggttaaaacagtaccgatgccgatcggcccgccgagcagccagccgatcaataaaatcgtcagctccattccgtttcggacccactgaacgttccagcccgttttctcggaaatcaaaagcatcagggagtcacgcggacccgcaccgagatcggccgatacataaatgccgactccgtaaccgataaaaataacgccgatcacgaatacgacagtgcttgaaatatacgtttccgggtctggaagaatataagtaaagaaatctataaaaataccgattaacagcatattgagcacggcgccgattttcggccatgcttttgtaaataaggacgttaaacctacgatgaccgccccgacaataatcgcccattggccgaccgtaaggcccaaaagcatatacagcccgtagtgaaacgcatcccaaggaccgatgccgagcactttcccttcaatcgtaagagaaaccccgaaagacaaaacaatcaatccgacaaaataaaaaagccagcgcaaaacaagttcccgcttcaatggattcccctcttttcaaaaaaacaatcaattgtcattgtatcatattcttcagtggggtgatatccaaaaaatgttttattttgtgtaatacttgtaccaaactttattaaaataacaattgactaaaagatatttccattttataaaattaatgtataatatttactagtaggtgatctttatagggatagttgcttaaaaggtatatagactttaatggatttgggatcattctaaaaaaggagagtaaacatgaagaaactttatattagtgctgtcctgggtttattgtttgtttttgttggtggaacaaaaatacatgctcaagaaccacagaacaataacggggttttggatgagaataaattcattgatgaaacagtgtattcatatacgcagccaattagcatacaggatggtgaagtaacaacacaagcgaaaaaatatatcaaaaccgtgtcagttaataggagctataaaagtcttttaaacattgtagttgccagacattactctgatactactttcacttacggaagcggtaagttatataagagtcccagagctttaagtaatgattggtggacacttcctccgaattttaaatcaggaagctctaaaagctgggactggtacaatacagggaaaggtgcaacaggacgttctaatttacaagtaagatacacttggggagttccaacaccatgggggccagttggatctaattatagctcaagaataaaggtttcatttaaatcaaatggcagttggtatacaaattaaagctatatatgaaaggtgacataccgatgggtacaatagggataaactttaaaaacattcaacatcaatatcgtacgaaggatgtgctaaggggggtgagtttccatgccgatccctcctccatcacgttcttggcaggcgagaatggagccgggaagacaactttgataaaggttgctctcggcttaatcagtccgaaggcaggaaatgcgctgttcgacgggcaaagcgtcggggaaatccgggagaagatcagctgcgtgtttgatgagcctcctgtttatcctaatgaaagtggtcttgacaatctaaagtttttatcaggtatacacagccttgatcgaaagtggagtcaggaggtttgtgccatgctcaaattggatgagggacttttaaaacaaaaagcaaaagcgctatcactgggtcaaagacaccgtttagctgtagcggccgcgttattgcgcaaacctaaatatttgtttcttgatgagccgtcaatcggcctcgacccaccgtcatggcagctggtccaaatcgctttaaaacagatgactgccaggggatgtgcaattttgattacggggcaaaattatgacgcgattgaaaatctcgctgacaatatagcgattttgcaaagtggaaaaattatcttctccggtcctattgtaaaacttgttcaagcatttcccgtatatgttcgaattgtaactgatgaccatcgggaaatagctgtgcagtttccagaagctgaacctgattcttccggaatataccgcatcgtttgcgaatcaggtgaacaggcccgcgccgtgattgatcaggtgaggagaagcaccctgaattttcaagagctatcgactgaaaaagcgtcaatggggaaaatggtgacagatatttacaaggatggatttcagtcggaaaagagagggttaacgtatgaatccgttcaaaattgaaacgaatcaattgaagaatagcatgcttgtgagggtttgtatcgcgttattattttgttgctttatctgggggcttctcactttatatcaaagcgctgaaggcgaggaacgcagacaggaaaagattcaccaatccgtcattgatgaagtgaaaaagaatggggcggaggaagagcttgaaaacggcggattggagattgaaaaaaatgatgatatagcgcgtagtatgtacataggacttcatccaagtgttactcctaatctgtttttattaatcctcgcgaacattgggccaattgtttttattataatcggatctcaccttgtcggaagcgaataccatcaggggactgtgaaaatgaaagccgctcacatcggatggagaaaagcggtttctggaaaactatgcgcactgttaagtctggttattgttatggttattgcagctttattgcttggactggcaggcggttggctggcttggacgttcgccacggcacattcagacttagccgcttctcttgaagtgaatgcagctgtctcctatccggtattaattttgtttttaatgatcggattgacattttacagtgttctaggaatgactgtcacgctgttgacgaaaagccggctggcgggtgtgctgatcagcttggcgatcccgtatgctgagcaaatgctgagtctgccttttttgccattgactgcttatcaatccctcatggttcaccattttatttatgtcgacggaagcatcatcggccagccctatttgacagagccgatgggcgaaccgggcgcttgggctgttcttgtatgctggctctttgttgtcattgcggttcagcagtttgcagcgaaaaaacagcagattttatgaaaaaaggggggaatggcgttgatttttttagttaggctgatctgtcttgcctttttagcctgtctggcgctgttgttttatgcaccttttctggcgatgcccgtttggatcgctttgatcattgccttaatcgtctgtctgtatcttgcctttatagaggaaatgaaggaatggagaagacgaaagcactaatcctttcttcagcgttttttcttgtataaaagaacgtttgctaaaacgaaatagatgacggccgtcccggacacaaacaaaaaaattctttccactctaatgccgtcatgtatgcgaagcggaggagttcgagatgttcatccaagtaataagcctgggtatatgcgccgactgtcatgccgataaaggcgaatagaccgaccacattgagcaccattctcatactgaatgtctttttctctttttctctttttctctttttctctttttcgtggttcattttaaagaaatcctttccaatatgaatttatcattctattgtacgaatacaacgcttggatgattcaaaaacttcttaatctattgttaagaagtttttttattttggagaaaatgtaaaagataaaacaatttcatgaactttttgagcgaaggcctaaaaatataggaatattataccgatatggcaagtgaaatctttttctgaaatataaaagacaaggcaggagagaaaatcatgcagcaacgcaatacaccggatgtacagagatggtttccgagcgaggacggaaatgaagcaaaacgaaacgagttcctatcattgatcgagcagctgatcgagggagtggacaacctgaaaaatccggatcaggtcaaccttggcggcgagaagaaccgagagggcttcttttatgaaaagctggttgcagagagtcggattccgcatgaaggtgcgccgatgaaagaggttaacgaagagctgttgaagctgttgcacggccatccgtatcacaccaaatactttttcacgaacattctgccgatggccagcatcccggggatattaggcatgcttacggcgtttatggtcaatggcaataacctgtgggatgtgtacggtccagccggagcggaggcggaagtgaaggttacagcgatgatgtcaaagcttgctgggtatgatgccgaaacaagcggaggatatacaacgtggggaggacaaggggcggtatacagcggcctcagaatcgcgattgccaaaatggctccgtcatccctaaaagaaggggttcccggcaatttctatgcgttttgttctgaagcggctcattacagcttgtataagtcgatggaagccgcaggactcggcagcgatcatttaattaaagtcaaaacaaatctcgaccattccatggatacggaagatttgcgagagaagcttagacaagtatgcgaagccgggggcattcccgtctatatcgtagccacgacgggaacgacagatgcgatcggcatcgatgatgtgagcgctgtccgccgtgcggctgaagaaaccgcgaagagcttcgggctgccggttccgcatatccacgccgattccgccctgggaggattttttgccttttttaatgagtacgatctgaatgagaacgctttatccttcagtcccggtgtcctcagcatgatcaaaccgattcaggaaaaaatgaggcatctgcatgctgccgattcgctttgctttgattttcagaagctcgggcagacgccttatgtgacgagcctgtttcttgtgaaggatcgtaatgacttaaaacggatcgatctggatcccgatgagacgccgtatgtcggccaccgcggctatggggactaccatacgggctacacgctggaatgttcgcgcatggccagttcgatcagtatgtacagcgcattgatggcatttggctatgaaggctatcaaaagctgcttgcccagttccttgaagtcaacctgcattttagggaacagctgtctcggcagattccggaggccgatattgtgaacccggacaactgcggcatgtctacgctgtttcgcatttatcctgaaggggcgcctagatttgaagacgaaatttcgggagcatgcaccattgaagagctggaaagaaacaatgcgcttactgaaaaattatttgaaaagctcggaacaaaaagggacaagatgttttttggcgatacgaaaaaacacttgcttgtgaagtcctgtgaaggggttgaattaccgctttgcgtcagcaagtttttcgtcatttctccgtataccatgcctgaacatgtcccgggaattatcgattatttaaaagaaactattgaggaagtcttccgggagcatgggtctctcatgacaaattaaaggggatatagacgatgaaaacgttgaagaaaaagctaacagaacacatttcagtcaaaattatgattggcgtcgccttagtgcttttaatcacgatcgcatcattttcagccgtgtttacttttatcagcaaagacttgtcagagcagctgaaacagcagttccaaaaccgcctttataccgatattcatcttgctgaaaatcaaatcaaacgtctggacgggaatccgcttgagatcgattccgcagacggtccgctttacaagcagacaaaaatggctgtggacagcctgaaaaagaaaaacaaacttgagaatatttatatcctttccaatgaaggcgggaaggagcggattctcgtgctgtcggatacgcccgatgatttcggcacggattacagcttttctcctgaaatgaaagaagccttgacgacaaacaaagagacggtaagcgacgtgtatgaggacgaatacggcatccaccagtcgatttttctgccgcttgagaacggctcaggagaaaaggtgggaattttggggatcgaccttgatgcttccgtgattccggagacagcggcaaaagcgaaatggtatacaattgcgatctcagcatttgtcttgctgctcggaatggtcatggcctattttctcggttcttacatcgcgaagccgatcaggcagctgatgaaggcttcagaaaaaattgccgacggcgatctatcggccgacatttctgtcaagagccgggacgaagcaggaaagcttgccgaatcgttcaagcggatgagcgaaaatttacaacaattgattggacatatttcagcttcctctgaagaggtatccaagacgagcctgcagctgaaaaatgtatcggctgaatcgagcgaaagcgcagctcaagtggctgaatcgatgaacagcatgagcgagggaatcaacgaggttgtctcttcagtttcggattgtcatacatcggctgccgaaatcgatcagcagcttacacatgtcacagaaaaagtgaacgagatgaagaacgttgccgagggcgtcagcaaggattccaagacggggcaggagcttgtcgaagaaacattgcggcagacccagacgattaaaaacgtgatggaagagtccaaacaagcggcatcagagatgcaaaaccatacagaagaaattgaaaaagtcatcggaatgatttcctctattgctgaacagacgaatttgctggcgctcaatgcttccattgaagccgcccgggtcggtgaggaaggccagggctttgcggttgttgccggagaagtcagaaagctttctgaacgttcggcagatgccgctttatccgtttcccagcttgtggcgggcacgcaggagagcagccggcttgtcatggaacgcattcaggaaggaaacgaagcggttgacaaagggcagattttaatcaatggcacatacgagaatttttcaggaatttttaaaggaatttctcaattcgccgaacgcacagatcaattgcttcagtccttgttaaaagtcgaaaaatcgtatcaaaccatttcgtccgcgatggagcagatttccgccgttaccgaagagcaggcggcaggctctgaagaagtcgctgcggcagcggagcagcaaagcgccggcatgcaggaaatcgcatcggccattcagcagctctccgctttgtcggaagaattgaatcaggcggcatccaagtttaaactggccgctgaataaaaagaacagcctgatctctcttgatcaggctgttttgtttatacaggattcaaaatccggtttaaaaactgttttgttcgttcttccttaggggctgagaagatttgttcaggcgggccctgttcgacgatgacgccgccgtcgataaagacgacttcgtctgcgacatcctgcgcgaatttgatttcgtgggtgacgacaaccatcgtccagccctcatttgcaaggtctttcatgactttcagcacttcgccgaccagctcggggtccagagccgatgttggctcgtcaaaaagcatcagctcaggtttgatggccagggcgcgggcgatcccgacgcgctgctgctgtcccccggaaagctggaatgggtagagatccattttgtcttcaaggccgaccttttgcagaagctgaacggcttcctttttgacctcttctttattgcgcttttgcacttttacaggcccttccatcacattttcgagcacggtgcggtgcgggaacaggtgataggcctggaataccattcccgactttctccgcaggcggaggaggtcagcaggtttatttttcttggaaaaatcgatggtgaaatcgtcaaaagaaagaatgccgcggtttggaatttccaaagcgttcaggcagcgaagcagcgtcgttttgccggaaccggaaggccctaaaatggcgatcacttttcctttttcgatgttcagatcgattttttttaagatttcattttcgccgaaggatttattcagccctttgatcgcaagcatggtctatttccctccttacttggccacataccggtccaaacgccgttcaatctgctgctgaacaagcgcgagaacaaagcagatgatccaatagatgaatgcggcttccatataaatgattaaaatttggtcaagattgccggccccgatttcctgggccttccggaataattcagcaacaagaatctgtgacgcaagcgatgtatctttaaccaagctgatgaatgtattggataatggcggaattgacacgcgcacagcctgcggcaggatgaccctggtaagcgccgttttttgagtcattccaatcgaataagccgcctcccactgtcctttcggaacggaaaggatggaagccctgatgatttccgacgcataagcgccgacatttaatgaaaaggcaatgattgcgctcggaaacgggtcgatcgtgacttgaaacgctggaaacaagtaaaaaataatgaacagctgaacgagcagcggcgttccgcggatcgctgagacataaatgccgaaaaccgctcttaaaatgcgggatttggacattctcgccagcgccgtgatcaatgcgatgatcataccgaatataaaagagagaatggcaaggggaatcgagtaatagattccccttaaaaagatcggccaaaatgactcacgcacaagatcccacgggatcgcctggccgatggccgccgcttgtatattacttagaaacatcttcgccaaaccatttcttcgctattttcgcgagtgtgccatcctctttcatgtccttcagcgcggagttgaccttgtcaaccagttcgccgcttcctttgcggaaagcaaaatgcgtagtttgcggctcgcctgtttcaaaagcgattttcaggtttttgtttcctgacgtcttcaaatagttcagcaccgccagtttatcgttataggtgaggtcgacacggccctgctgaatcagctgaaacgcttgagccattccttctacgccttcgatttcagcgccggcgtttttcgcaaggtcattatagttgcttgtcaaagactgcgcggcttttttccctttgacatctccttcagactttacatcgttgttgtccgcttttgtgacaacgacggcttgggaagttgtatatgaatcagaaaaatcgtactgatcttcacggtcttttttcccgacttggttggcaacgacgtcaaaacgctttgagttgagtccggcaaacatgctgtcccactgcgtttctttaaattcagctttcaggttgaggcgcttggcgacttcctgcatcacttcgacatcataacctgttaatttatctgtttttttatcgtggaatgtaaaaggttcgtacgttccttcagtaccgactgtcaatacgcctttatctttaattgaagaccagaggctgtcgccggctgcgtttttatccttggaattgtcccctgacgcgccgcatgcggccatcacggtgatcaacagcgtcaataatacagcgaatattgctttcttcattttattccccactttactgattggatttagttgatatgattttacttaaggctcttacaaaagtaaagcataaaccttttttagtatgagtcaagaaatacgtttttagtgatgaaagggagagaagatcattctgattcctgatcgaagcggatcttccattttttaagcctgtattgcaggctttgcctgctgatccccagcacccgagccgcttgtgacacattgtaattgcattttttaacggttttttgaatataatacttttcggcattctcgatttgttcctttaaaggagcggccgaggcggaaggaagcggggcgaacagatcatagccctgctgcggcagctgctcttttgccgctggtttcgtcctgtattgcaatggaaggtgcgtcagctcgattttgtcttcgtaggacatcaaattcatggcgccttcaattaaatgttcaagctccctgacgtttcccggccaatcgtatgaaagcaggaaccgccgcacctcttcttcaaaacccttgacctccatttggaacaatgcgttgtatttgtcgataaaatgctgcgtgagcggcataatatcttccttccggtcttttaatggaggaataaacaaggtgacgacgctcagcctgtaatacaaatcttttcgcagcctctggccgctgacagcgtcgactggatcttcgttcatcgtcgcgatgatcctgacgtcgatcggagtatcctttgaagcgccgatccgcctgatcgttttttcttgaatcgcgcgcaaaagctttgcctgcaatctgaagtccaaagaattgatttcgtcaaggagcagtgttccgccgtcagcttgttcgaaaagacccggacgatccacggctcccgtgaatgcgcctttgaccgtgccgaataataggccttcgacaaggctttccgggagggctgcacagttttgcgagatgaatgggcccgttgagcgctggcttccgttatgtatactttgggcgaacagttcttttccggttccggtgtcgccaacgatcagaatggaggaagaggtccgggtcgcccgctttgcatgttcaatgacttccttgaacgccggactgacgccgatcaggctgtcaaacgtatactttgtgctttctgttttgttcatattttctctgatcaggcgttcaagctttgtgacatctttggcaatctcgaccgctcctttcgtattcccgttttccataatggggaatgtatgattgacggtcgtaatttcctgtcctttgttattaaagtaagtctgtttgacgtttttgttcgttttcccgtgatgcagcgcctgcaggagggtgctgtcatgctggctggcaaacgtaaacacgtccagcacgtttttgccgagcacatcgccgacatccatcccttcaatctggctcatctttttgttatagacaacagatgtgccgttttcatcgacgacatgcaagccgatatcgatttcatctataattccttgaaaaataagtttcagaaaatcataatccttcagcaattgatatccccctttgttcgtatctgtctccattttaagtgaagacttgataagggtgcaaaaaaatatgcatttatttttgcacctttgcataaaaaccgcaaaattttttgcgagttacacatgcaatgttctgaaaatttgcggtattaagagttggcacgatacttgcatataagatagtgtgaaacaaaatacgacatctggcatgtatgtccaaaaataagaaggaggaatcagaatgacggttctatcaaagtccgagaaaattatgaagcaaaccgcacattttggcgcgaataactatcatcctctgccgatcgtgatttctgaagcggaaggcgcgtgggtgaaagatccggaaggcaaccgatacatggatatgctgagcgcttattccgcagtgaatcaagggcacaggcacccgaaaatcatccaggcgttaaaagatcaggcagacaaaatcaccctgacttcgagagcttttcacaatgaccagcttggtcctttttatgaaaaggtcgcttcattaacggggaaggacatggttctgccgatgaacaccggtgcggaagcggttgagtccgcagttaaagcagcgcggcgctgggcttatgatgtaaaaggcgttccggacaatcaggcggaaattatcgcatgtgaaggcaattttcacggccggacgatgctggctgtgtcgctatcttcagaagaagagtataaacgcggtttcggaccgatgcttcccggcatcaagctgattccatacggggatctggaagcgctgaaacaggcgatcacaccgaatacagccgcttttttaattgagccgattcaaggtgaagcgggaattgtcattccgccggaaggctttttgaagcaggctgctgaagtctgcaaagagcgcaatgtcttgtttatcgccgatgaaatacagtcagggcttgcacgtacagggaaaatgttcgcctctgattgggaggacgtcacaccggatatgtacattttaggtaaagcgctcggaggcggcgtgttcccgatatcgtgcattgcagcaaaccgggatgtgcttggcgtgtttaatccgggctcacacggatcgacctttggagggaacccgcttgcatgcgccgtatcgatcgcagctcttgaagtgctggaagacgagcggctcgctgaacggtcgctggagcttggggaatactttaaagaaaagctctcgcaaattgataatcctaaaatcaaagaagtgcgcggcagggggctgttcatcggggtagagctgaccgaggcggcgcgtccgtattgcgagcgcctgaaagaagaagggctgctctgcaaagaaacgcatgagacggtaattcgctttgcacctcctcttgtcatttctcatgaggatctggattgggcgattgaaaagattacccgtgttttgtcgaagtaaagcgaacggctgaacaataaggggattgttcagcccgttttttcgctgtctgtgcgaagtttgtcaaaaattgaaatatcaggaaaatgttcagaagatttaaaaaatagtctatatgtcatagggggagctgacattagggagaattgaaacggaaggggtgaaggcggtttgaatcatgaaaaccgtgaacaatatacactgaaacgaacgatgaaatcccgccatttgtttatgatctcgcttggcggcgtcatcggaaccggcttttttctcggaacaggttatacgattaatgaagccggaccgatcggcgcgattctttcctatttagcgggcggaatgatcatgtattttacgatgctctgccttggggagctcgctgtggcaatgccggtttcaggctcttttcagacgtacgcgacaaaatttatcgggcctgctacagggtttgccgtcggctggatctattggctcggctggtcggttactgttgctttggaatttttgtcagcggggcagctgatgaaaagatggtttcccgatgtcggcgtctggatatggtgcttgattttcgggctgctgcttttttcactcaatgctttatcggcaaaggctttcggggaatcggaattttggctgtccggcatcaaaattatcgtcattcttctgtttattattctcggcggaggcgcgatgttcggactcatcgacttgaaagacggacaggctgcaccgttcttttccaatctgattggagacggaatttttccaaacggattcggcgcgatctttatcacgatgatcaccgtcaactttgcctttcaggggacggagctgatcgggatcgcggcgggggaaagcgaaaatccggaaaaaacggtgccccgctccatcaaacagacggtctggcggacactggtgtttttcggcctgtccgtatttgtactggcgggattgattccatgggaaaaagcgggggttgttgaaagtccgttcgttgtggtatttgaacaaatcggcattccgtatgccgccgatctgatgaactttgttattttaattgctttgttatcggtggcgaattcgggcttgtacgcatcgacgaggatgctttattccctggcgaaagagggaatggccgctcaggctttaagccgggtcaataaaagaggtattccgatgaatgcgctttggatcacgctcggttttgcgggtttgtccctcatctcaagcgtagtcgcagcagaaacgctctacatttggcttttgtctctagccggtttaagcgcgcaagtcggctggatcacgattacggtatcacagctgctatttcgcagacgatatgtcaaagaaggcggaaaggttgaagacttaaaatttaaaacgcctctttatccttatttgccgctgacgggatttattttaaacagcgccgtccttgtgagcctcgcttttgattcagagcagaggatggcattgtactgcgggattttattcatgtcggcctgctactttgtttatcacgtgtttgtgaaaaaacgccaggctcttgatcgacaagaagcaatgatctatcaaaacaaacgatgaggtggttattgatgaataaacaagtttctttgattggaatgccgatggacttggggcaggcgcggcgcggtgtggatatgggaccgagcgcgattcgctacgctcatatcgtggagcgcttaaacgagctgggctatgatatcgatgatctgggcgatgtgccgatcaaccgcgatcagccaaaaggagacgaagggctgaaaaatttagtttccgtactggaaggaaaccgcaagctggccgatatcgtcgacaatgtcgtcgagcagcgccgcttcccgctcgtgctgggcggagaccacagcattgccatcgggacattggcgggtgtagccaagcattatcaacagctcggcgtgatttggtatgacgcacacggagacctaaatacgcttgagacatcgccgtcaggcaacatccacggcatgccgctggcggtaagtctcggtgtcggccacgaaaagctggtcaacctccacggctatgcgccgaaaatcaaaccggagcacgtcgtcatcatcggtgcgcgctcgcttgatgaaggagagcgcaaatatatccgtgaaaccggcatgaaagtctataccatgcatgaaattgacaggctcggcatgacgaaggtaatggaggaaacgatcgagtatttgtcagcaaattgcgacggcatccatctgagccttgatctggacggtcttgatccgagtgacgctccgggagtcggcacccctgtcgtcggaggcatcagctacagggaaagccatttggcgatggaaatgctctatgacgcagatatcattacatccgccgagtttgttgaagtcaacccgatactggatcataaaaataaaaccggtgaggcggccgtcgaactgatcgaatcattgttagggaagaaactgctgtaaccaatgcgaaggagagggcatcggcatgatgccttctctttttttattggcgcattcccgggcgcttatcaaaataaagccaaaaattctctcacaggcttcggcagaaaactgccggccctccaaacgacagacggctgcagaatgaacggattgttttgaatttccaatgtctgaacatgccgtgcaaaatgcgccggcagcatggacagcggcagaatcgtcgctccgaatcccgaagtgacgaggctgagaagcgttgtagaatcatggcactcacaaaagaccctcggttcgaggccagatgattgaaagtgatggacgacctcgtcgtaaatcccttttccgtgcgacggcctgagcagaatcagcggcaggccggcaatttctttcattccggcttctccttttaagccatacgactgattccctggaagaacaagcttgcatggaacctccggcaggctttttgattcggtgtttttgctgtggataggcgttgtcgtgacggctgcatcgatctgccggctttccaggagctcgcttagccgtgaaggctcaccttcccaaatgttaaacattaaattcggatacatatctctgatcttcgagacttttgagagcagcagggccgcgcagtaaatcgtcgagccgacggcaagggttccgttgacttcttcacgcagctcccgcacctccaagatggaatcctcaagcttgtgcaggatttcttttgctcttttcaaaaaaacttctccttcgtaggtcaacgtcaggtttttctttttgttccggtcaaataaaacgactccgagctcctcttccatctgcttcaactgcctggagagcggcggctgtgcaatatggagccgcttcgccgccgttgtaatttttccttcccgggcgattgtaacgaagtattttaactggcgaatatccattttcacggcactcctttttatacctttagagtattatatatagatttaacagatattttcaatatggtaaatagaggcgtatcattttaactgaagcaccaggaaggaaagggggggggcgcatatgaacatcatcgtcggaatcacgggcgcgaccggcgcggtatttggcgtgcggatgctggagtggctgaagaaaaccgacgcagagacacaccttgtcatctctccgtgggcagcggcaacgatcctgcacgaaacgggatatacgatgaaagacgtggaaaagctcgcatcttttacgtattcccacaaagaccaggcggcccgcatttcaagcggttcctttcaaacggacggaatgattgtcgcaccgtgcagtatgaagacgttggcgggcatccgcaccggtatggcggataacctcttgacccgttcggcggacgtcatgctgaaggaacggaaaaagctcgttctgttaacaagggagacgccgctgaaccagattcatcttgaaaacatgcttgagctgacaaaaatgggggcggtgatcctgccgccgatgccggctttttataatcatccccaaaatctgaccgaaatggtcgatcatatcgtatttcggacgctggaccaatttggcatccatctgtctgaagcgaagcgctgggaaggtatgaaacaggagaaataaggaggataacagaatggcttatcaagattttagagattttttaaatacgctgaaaaaagaaggacagcttcttgaagtccaggaagaggtgaagccggaacccgatttgggagcagctgcacgcgccgccaacaacctcggagacaaatcacccgctcttttattcaacaacatttacggctataacaatgcccaaatcgcgctgaatgtaatcggctcctggccgaaccacgcattaatgctcggccttccaaaagacacgccggttaaagaacaattctttgagttcgcgcgccgttataatcagtttccagtaaaagtgcaaagagaggagacagcgccgtttcacgaaaacgaaatcacagaagacatcaacctgtttgacattctgccgctcttccgcatcaatcagggcgacggcggcttttatttagacaaggcatgcgtcatttcgagagatgtcgaggatccggaccacttcggcaagcaaaacgtcggcatgtacagattgcaggtaaaaggcaaagaccgcctcggcattcagcccgtcccgcagcatgacattgcgatccacctgcgtcaggctgaagagcgcggcgaaaacctgcctgtcacgattgcgctcggctgcgaaccggttattgcaacggcggcatccacaccgctcttatacgatcaatcagaatacgagatggcaggggccctgcaaggcgaaccatataaaatcgtcaaatcaaaactgtctaacttagatatcccatggggcgcagaagtggttctcgaaggtgagatccttgcgggcgaacgcgagtatgaaggtccgttcggcgagtttaccggccactattcaggcggacgaagcatgccgatcatcaaaatcaagcgcgtctgccaccgcaacaatccgatttttgaacacctgtatttaggcatgccttggactgaggttgactatatggtcggcattaatacatgtgtgccgctttaccagcagcttaaagaggcgtatccgaatgaaattgtcgcggtaaacgcgatgtatacgcacggcttgatcgccattgtatcaacgaaaagccgctacggcggattcgccaaagccgtcggcatgcgcgcgctgacaactccgcacggcctcggctactgcaaaatggtgatcctcgttgacgaagacgtcgatccgtttaacctcccgcaagtgatgtgggcaatctcaacgaaaatgcatccgaaacacgatgcagtcatcatcccggatttatccgttttggcgctagatccaggttctgaaccggcgggaatcacccacaaaatgatattggacgcgacaacgccggctgcaccggaaacaaggggacactattcacagccgctcgattcccctataggaacgaaagagtgggaagcaaaattaatgaatctgctaaatcaataaaagaggagagtgtttcatcatgcatacatgtccgcgctgcgaattaaaaaaagcggaaaccgtcagcaaatcacccgttgaaggagcctgggaagtctatcaatgccagcactgctttttcacttggaggtcatcagagccggagacgatcacaaatcctgaaaaatacaatccggcctttaaaatcgatcccgctgaagttgaaacagctgtacaagtgccggcgattccagaccggaaaatctaaagggaggcatccggcatggctcagctatcaaacgaactatttcagcttttaaacggagagaagctcgccggtaagcggcacgaagcgatgatgctccagaccgtcacagaagacggctggccgcacacggcgatgatcagcgccggcgaaatccttgccctgaacaaaaccgacatccgcctggctctctggcaaggcacaacgacgaccgcgaatattgcgagaacaggacgggcgctcttcgtcgcttgctggaaaggcaaagcacattatgtgcggctgtctttaaagaaactgcccgaattaagagacgccaaacacccgagagcgcgcttcgccggtacggtcgaagcggcccgggaagatatcgcaaaatacgctgatatcatctccggcgttcagattaagctgaaggatgaagcggcggttttgcggcggtgggaagagacgctgggggagctgaggaaatgaagaaaaggaccatggcgaaccatggtcctttcaattatttctgcagcattttattcgtcactttataagccaggatacagcaaattgtaataaaaataatggcgatcgaaaggatcacgagcttttcagcaacggtatatatcggcatgggaagaatagcagcgcagacggcaaacaggctgccaaaataaacaaacaggatcagaggctttttgtattttttccaaatcacttgattaatcccgtttttttcgggatctgccgggtgtttgcggtcttcatctttcatcaatttatttagcagtagataaatgagaaatgcgaataaagttgccgagaaaatattaaaacagaggataaacagcttttccccgatgctcatcttcggattcagaacggcgcttagaacggagccgcatacgaaaaacaggtagacggataagatggctttgtttcttggtttttgtagaaaattagacattcggatctctccaattgtaaatgatttaaacgctgaaaatgagatggaccagaaaagaaaaaatataaaagatgatgatgcttaagatgcctctgcccacaagataaagggcgaaatacagttttctcaggaaccagttgtatcttaatagccgtttgtaaacaaagtagccggtgccgacaagaagaaaaacgaatgtatttgtgattttatgggaccgtttttcaggttttaaaaagatcattttttcatattcaatgatcatatgactcgcaatgattaaaaaacacaaactgtaagcgaaatgagcggccaacataccggcgattaagtattcggtatattcaacaaaagtttctggtgacatcataactcctttatgaatagcggtctcaagcgttttttaactgacataaaaagcttttcattcttcgtcaggcattctttccaaacaagaccggttcagcatttgattcgccgtttgataaaccgcaaaaaaattgcccgatatcacggcaaacagaatcgcaaacatgccggatttccaagcgagtgagagttcggacatggaaaacacggatattcccacaatcagtatgccgacgaagtagaaagagagcgtgaacggttttctgtgtttcttccaaaagattttcgcgacgatgttgcatcggggccgcgctttgatctttcttcggcttatttataaacacataaatgatgaatgtgaataaagaaattgaaacgaacataaagccgatgacggcaagcctttccttccagttgattgcaggtttgacaagggcggccaaaatgatgattgttgcatatagggaataaataagaaaatgattttatttctgcctttcaaacatgacatctccttgtgccttaaatcctatgctgtctgatgatatcttgattcgctttgatgaagaagtatttgtggatgaatttgacccccattatagaaaataaacaagccataagcagatagacgatactcatcaacaaatagacggcagactctgaaactcgcaaaacagcatgacttatcatataaccggccgccggaacagccgccaaaagcatccctgtcggagctgctgtctcccttttgcctcttttaggatcagggaatacagccaagtaataccgaatgacgaggaagatagaggcggcatatatgaatagtgacagactgatcaacggtaaatgaaaaccgatggcagaaaacatcattttttgcgccgtgatcagctggcaatatgacataccgctgaaagatacgcccataaaccgaacatattgaaggtgatgaagatattcggtcatgtttctggtatttatgaggatcatccaaacattgatcagaatagcgacagggaggacggcaaaagtgaaaaattcgactttgctcgccagcacaggtaatatgcagagaatatccagcaccaacacgataaaacaggccattccccatttcgtttcccggctgacgggagccttcaaatgagattgaatattgtaaggtaaatctttgtatacaaccgtttcttttaatctcagcaaaacttatattcctccgcttatccctctgaatttttataattctccatgtgttttttcagccagaccttttttctgaagatatgcaataggagcggaagaacgaaaaagaacaagctgataaccgaaacaaacaagggaatttctgaaggggcttgttccaataaaccccatatcgtcatgatgacaaaaaagataccaaccacagggaataaaatcgtgaagatgatcatagcttcgtttatttttttatatagaaaatttttttcgtttttcatattgagccccttttcttgatgggtgttttctgcatcggcaacgtttggctttgtgttttttcatatctcgtctatcttcttgaaacaataattcgggaaactgagataagagaaagcatcccgatgtgagatgctttgaaatgtatttattctcgcattgcggcattatgtattttgaaaagatactgtatactcaagcccttttaataattcgttccattgctcaagtgtccttaatgaaatatgtacaggtttttcattgtgttcatcatactgagcaacccaaacgccacgggcagatggaataaaaaagacgatattttgcaagaaaggtccatcgtttaagctagggatgtaaaaatgtgagatgttgtttagcgaccattggtttgcttcaagatcggctatcaattgattaaagctatgttcttcctcaggtgaaaaagaacttttcttccgaaccttttctgtcatgtctttattactcagccagtcaaagcatttatctgaaagacgaaattttaaaggaatatgttcctcatcagttgaaaagtggtaatagtctttcatcagctgggcaatttcctgctcgtcgacatacgcaaattcatggatgatatcgcggtcaatcatatggaaaagccatgtttcattttcaaaatggtgaagcattaaagtgtttttattgtcaaggttggaacagcggatcatttgttctgaattcacataggaaacgatgaatttctgcatttcttcgcttaaaggattttcgtcttttgaacttttttcttcgttccagtattgttttaaaatgagctggttgacagttgcctctaagattgcatcccattctttttttgatttttttcctaacgatgattcaagaattccttttgcaacaccaggatagtcacataaccctactaaaagcgctagttcttctgatgtacatgtgatgaggtgtttcattgttttcacatccttgattataaacttaaaccttgaaaatgaagtgaaggataaatgataaaatatagaaaatgatgatacttaaaataccgctccccagaaggtaaagggcataataaaattttcttaggaacaagttatatctatatagtcgtttatatgtaaaataacttgcaccaaaaatcaatgcaaaaccgaaattaacagtttttttaaatatatttgaggggggtctgaaagtcccctgctcataataattcatagttatatacccaagaaataaagtgcaaagtccaaatacaaattgagaacttaaaatagcagcaatcaaatattcagcatattcaacaaatactttcggcgtcataatgcctcctatctatttaaaccaacttttcacagactcaaaactgtttttaattcctttttcaatagaaccagcaactttttcaccagcatccttaattgcatcaccgtatgaagagctagcaattgctccagctactccgcctatcgctccaccaacaatcactcccacaggaccgccgacgcttcctattgttgctccaatttcaacacctgtagaaacagcaaaaatgtctgtaccaacacctgctgcgaaacgtcctgttttttctgcaaaacttttgtccgagttctcgggatcggtatattctgtaaggttagaagcgaaagtaactgcggtaccaacaatagggactcctctttctaatgcagtaaacccttttgccttggctgtggactccattatatcaaccgcacccgcttttgtcctcagggcagctctcttgcgaaattctttcccatctataaaactatgttgatttttagggaaccccacagcatgtttaaacatcatggatggactatcataagaagcgacaaatttttgcgcttttttaagtaatgggttgcttggattcgagtcagagatgtttttaatggttctcgcaactttcgaactgtgatccccttgagaagtccaagaacgatgtgacatgacctgaaatttatattcccctttaaatcgctgccacttcgtcggttttcctccttgataataaatttttaattttcgcgtccacgcgattgatgctgttgcgttggctgcgtgataccctaataaggctttatcaccgacatctaatggttctccgactgtttcgaagtaactaagaatttcgtgtgctatatttgttttttctttatcctgtgtatcaggattcgttaacgtttctgccgctttttcttctaatcgcccaagcatcttttccatcggtgtttcgccggggttttgcaggtcgttttgcaggccgccgggagcttgactgattgttgagtcattttgcggttttaaaattgaaccgcttttatattccgatatttcaatcttcggccccgtatacattttctccagctgctggatgtattgcttcatcgtatcgaggtcttctctcgccgctttcagcgcatttgtctgttcgcggtcgaaggtgtggagcttttcgagcgtctcgctgatttgtctttgcgctttttttgcgttttcgttgacggctgaatcgtctaggtcgggcaggtcgacgatgtggctgacggtggccatcgtctggttggcttttgacgtcaatctgccagtcagcgattcggcttgactgacgccgtcatggagttcgttctcaagaaagctttgcgagataaagccgttttggttcggttcaagggaatgaagcgcacttttcgtcttttctaaaagtcctttatagtcggaaataaaagattcataaaaaagaagaaaagtggtgtggcattcttcgtagaacgagcggatcgcttcaccgcccgcgccttttaaggcgtcgtcaagggaggtgaggcctttgatgctttgtttgacttttgaaatctcgtcagtctggttttttaattcggtcagcgttttgtctaggccggtttgaaaagcctgaacatctagagttttcaatgcgtagtcccttccttctacttggctttgatcgatgacgacagctttttgtcggcgtcttttatggcgttgacagcctgctcggtttgcgcaatttgtttagcgagagccgatgcgtatgcttttgtcaggcttttcaaatctttgttcatgctttcgatttttttgacgacgtcaaggttgtttttgccgctgatatctgtcggcacgttcggcttcacggcttgggctgaatgcttcagttttgagagcgcctgtttgacttcgcccgttttgactttgatttcttgacccatcgtaatcactcctttagcggcgggcttctctttcttctttttccagtttttcgattttcttttttaatgagctgatatccttacctagcgaatcaatgtcatcatttaaagaagagattttctcctttaattgtttaaacacttcatttaactgttttccgcaaatatcattgtaggccgttttcatatcgcttctgacgtttttaaaagaatcagccaggctgccctgccatgtcgtcggcgacagttcgggctttttgatgctgtcttttgaatcgtcaaattcctttttatctgcttctaattcagtttggcaatttttcagttgttcgagctgttgttttttgatgagaagtgtaccttgcagcccgtataaaactgttttttcccagatcatgttactgccacctcccggaaaatttgattcaaatgacctgttgggttccgttcattaaaggaccttattaatgttacaacatggtataaatgagttgaataggaaaaatgtaccgtgaacatagttgagcggtggagcaggggattccttattatgactgcgattttgcacatttctccattttcctgcaaggtcaaaagacatagttcttaagttttggatttttggtgtatttattttttgtttcacaaactttaaggtaattttaagaaagaggcgatcttgccaaccctaaacagggtttttcgaacagaatgtcaaatagattagatatttcataagaacaagggggaattgtctgtttgtgatgaataaaggaggacgggcggaatttctgtcaggatgctcagctgggttcttagaaaaaaatgcggctaaatatatatttatagattgtaaacgctgtcttgtcctcgaccaacagggggatgaagatgaagaagctgttagttgtttatgccgtgatgctctgtttgttttttctgtatgtctacgactactcccggggcgataaagccggttctgcagaagaaagcaggaggcctgcggccgcaggcagtctgtccgaaaaatacgtgatggtcacgtttcaatcgggaatcgaatattggaagagcggtctgaaaggctttgaggatgccgcgcagcttttcaacgtctctgtcgagtatcggggggcggcccattatgatgtccatgagcaaacgaccgtcctcgagcaggtgattgcaaaaaaaccggcgggaatcgctgtttcggcaataaacccaaaagctttaaaccctgtcatcgacaaggcgcacgagcagggtattccgatcgttttatttgattcagacgccccgctcagcaaagcttctacatatatcggcacaaataatatggaagcgggtgctgtggccgcaaggcgaatggccgaatttttgaatggaaagggagaaaccgcggtcattacccagccgcagcagtacaatcatcaggaaaggacgaagggctttgaacaaacgatcaagcaaaaatacccgaacatgaaggttgccgcggttttggacggaaaaggggatgagctgacgtcgaaaaaagaagcggcgaagattttggaggaaaatccgtccatcaaaggaattttcacgactgaagccaatggagcgagcggcgtggcccgtgctgtgaaggaggcgggacttgaaggggaagtatgtatcatcggctttgataaagacaagaaaacgctggacggcatcaaaaacggatcgatttccgcgacaatgagccaggacacatggcaaatgggctattggtcgctgcacatgctgtttttctcaaatcaccatctgaagcatgaacgcccgcttccggccgcaatcgacacaggcattaccatcataacgaaagaaaatgtggcagcctattatgcgaatgattaaacgtttgatcaataatgcgccgatccgtcataagctgatcagccttctcttgttaatcagcatgctgccgacgatcggcctgggcattttatcgggatgggccgttgaaaatattattgaaaaacaggtgatcgaccaaacactgcagctgatcggcgaagtgaacaagacggctgaagtgtatgtcagccacatgcagaacctgacatatttaatatcaatgaatgaagaaatggaagcgttttttagtcataaaaaggaggatggagaggcggattataagcgaaggacgtttttgcagggcctgacttctttatattccgaagcagcgggtattctcgttgtcaatgataagggtgagatgatcagcaatgagatgtatgaacgcacgccgacagatttgacaaaagaaccatggtatcaggcggctctcgacaatgaagggattttcaagatgatcgggaagcctgtcaaccggaatatcagaagccatgtgcactatagggaagatgaggtcgtttccgccgtcagagctgttatcgatcctgaaacacagcatgtgaaaggcgttgtactcatcgatttgaagctgcgcgtcctcgcagaagcgacaaaaaatatccgcttggggaaaacgggttatttgatgatcatggatgaaaatggcggcaatatttattcgccggagacttcgaatctatttctgccgaaaaagtggttccgtcaagaacgttctggatatttttcgaagcggatcaagggagaggaatatcagttcatttatgagacgtcttcctttacgaactggacgacggtcggcgtttttaaagcgggtgaaccggttttcgaagtgaaggaaatccacttgtatgtgcttttgtttttattgacggcggcgtttctcggaatgtcagcttcctattatttgtcccattccatgtcgcggccgattttgaagctgaatgctgtcatgaaaacggcggaaagcgggaatttttcaacattgtatcaggaggaaagggaagatgaaatcggccttttgggaaaaagcttcaatcgcctgatgttcagaatccgcgagctgatgtccgttacagaaagacaggagcgccaaaaaagagaagccgaattaagagcgctgcatgcgcagatcaaccctcactttctctacaatacgctggatacaatcaattggatggcaaggaaaaaaggagcggaagaggtcagcgatctcgtgcaggctttatccaagctgttccgcatttccttgagcaaagggaaagatatcatcccactgtctgatgaatttgaacatgttgaaaactatttgaaaatccaaaaagcgagataccgcgataaattaaactactcaatcgaaatgaccgggctttgtgatgaccgcctgattttgaagctcgttcttcagcctatcgtcgaaaatgcgatctatcacggaattaaagaaaaaaaggggccggggcatattgcgatcaaaggcatggaggaggatggctcgctaatcatcaaaatcgaggatgacggagccggaatggatgaagagacgctaaagcaaataacggatcaattcaaacacagggacgatacagcgggctacggcatgatcaacgtccatgaacggatcgctcttacatttggcgagccgtacggtataacggttgaaagtcggaaaggagccggaaccgccgtcacgatacggctaccaattttagcaaaagggggaacaagccttgagtgaatgttggcgcgtactgattgccgatgatgaaccgtggattcgggaaggaatacgggatgccgtctcttgggagcgctatcaaatgtcggtgtcggctgaagcggagaatggcgaggaggcttttgagctcgctctcaaacacggtatcgacttattgattgtcgacttgaatatgccgatcgtaaacggaattgccttgatgaaaaagctccgcggcgccttgccccagtgccgctttgtcatcgtgacgggctacgatcagtttgcatacgcgcaagaagcgatccggctgaatgttgatgattatttgttaaagccggtcgatcccgctcatctggaacaagtgctcaaaaagatcagcgtgtcgcttgcagctgagaaaaagaagctgagcgagcaaaagcttgctgagcagcatattcaacaaaacctcggccttctgaaggagcatgttttcagaagctggatcgaaaaccgggcagacgaagaagacgtttaccgacagctcgaatgcctccgtctgccggcgcgcaatcctgaaacgctcggcgtcatcgcggctggacatgtatggaacaaaccgtctgaagccgacaatctgaaagaaaaagtagaacgtttttttattaacgagcgagataaagccgtatttttcgacggagaccgcctgatcgccgcctgtctgtggcgttctgttacggaagccgaacagcgggcgcttgcagagatgatcaaagccgaattgcaggcaagcgcagccgtctgttttgcgaagcttgctgaaaacggccgctcagccgcgcaatgctatcagcactgcaggcagcaagtgtcgaaagcattcaatatctcgccggttgtcataagggccaaggagtatatgcaaaagcatttcactgaaagggagttttctttaaaacagatggcggatgcgcttcaagtctcgtccgtctatttgagcagaatgatgaagaaggagctcggcgtgacatttgttcagcttttgacggagatgcgcatggatcaagcggttcacctgttagagacaacccctctttcaattcatgacattgccgaacaaacgggctatgatacacagcactatttcagcactgtatttaaaaagacgatgggtgtatcccccaatcagtaccgccgcatgtcgggaattgaaagaacaggaggaaaattgtaatgtaagcgcttcaaaaaagtctgatttttataaaaatagttaattaattcaaaagacggacattcgaaagacatggtacagttggcatgattcatgatgggagaaatcaaaaagggggataccaagcatgaaaaaatgctggctgttgatcactgcaatgcttttctgtctcatcgttaccgcttgttcggggaatcaggcaagcggagggggagacaaaggctacgtcggaatctcaatgccgacaaagtcatcggaacgctgggtgtatgacgggaaatacatggtgaaagagtttgaaaagctcggttataaaacggatctgcagtatgcggaagatgtcgttgaaaaccaagtttcacaaatcgaaaatatgattacaaagggcgtcaatgtgcttgtcattgcttcgattgacggagaagcgctgaccgacgtcctagagaaagcaaacaagcaggatattaaagtcatttcttatgaccggctgctcatgaacagcaaacatgtcgactattatgcgacatttgacaatcataaagtcggggaacttcaagggaaatatattgaagaaaagcttggcttaaaagacaaaaaagggccgttcaacatcgaattgttcgcgggatcgcccgacgacaacaacgcgcatttcttttttgacggcgccatgtctgttttgaagccttatatcgattcgggcaaattaaaggtgttgagcggccagacttcatttgagcaaggggcgacgctcaggtgggacggcgcaaccgcacaatcccggatggacaatttgctgagtgcgcattatacaaaggcgaagcttgatgcggtgctttcaccgtatgacggaatcagcatcggaatcatttcatccttaaaaggtgcgggctacggctcggacaagaagccgctgccggttattacgggacaggatgcagagcttgcttccgtgaattcgatcattaaaggggagcagacctcaaccattttcaaagatacgagagagctggcgaaaaaagccgttgagatggcgtcatccgtcttaaaaggcgaaaaagcggaagtcaatgacacaaagacgtatgacaacggagagaaggtcgttccatcatacctgcttgaaccggtcgtcgtcgacaaagagaactacaaaaaagtgctcgttgacggcggttactataaagaatcggaattagggaagtgatccgatgtccgattgcattttagagatgagaggcatcacgaaggagtttcccggcgtcaaagcgctcgacaatgtccaccttcgcgttaaagcgggcgaaatccatgccctctgcggggaaaacggggcgggcaagtcgactttgatgaaggtgctgagcggcgtctatccgtacggtgcgtatacgggcgacattttatataaaggggaagtatgccaattcaaaaatattaagcaaagcgaggaagcggggatcgtcatcatccaccaggagctggcgctcgtcccccagctttccattgcggaaaatctttttttgggcaatgaacaggccagccgcggcgtcatcaattggcgaaagacaaagctggaaacgctcgaattaatgaaaaaagtcgggcttcaagaatctccggatacgcttgtttcccaaatcggcgtcggaaagcagcagcttgttgaaatcgccaaagctttggcaaaaaaagtgcagctcttgattttggatgaaccgacggcggctttaaatgaagctgacagcgagaatctgctgcagctcttgctcgaactgaaaaaacagggaatctcttcgattatgatttcccataaattaaatgaagttacgaaagtcgcagattcgattaccgtgctccgggacggacagacgatcgaaacgcttgatgttcaaagcgggcaattgactgaaaaccggatcatcagaggcatggtcggcagggagctgcaaaaccgctaccctgacagaagcgccgagatcggcgacgtcatctttgaagtgaaggattggacagttcaccatcctcttcaacaggaccgcaaagtggtaaacatggcggcgctttccgtgaaaagaggcgagatcgcaggaattgccggactgatgggctccggaaggacggagctggcgatgagcatttttggaagatcatatgggaaaaacatttccggcacaatcgaaaaagacgggcgggagctttacatcaaccaccctgaagatgccattaaaaacggcatcgtctatgtgacggaggacaggaaaggaaacggtttgattctgaaggacagcattaaagaaaacattacgctgtcgaaactggataaggtgtcgagccgattggtgatggacgagcggcgcgaacaacatgaagcggaggattttcgccggaaattaaacatcaagacgcccgatatcagccagcggaccggaaatttaagcggaggcaaccagcagaaggtcatgctgagcaagtggattttcgcggagcctgacgttttaatcctggatgaaccgacgcgcggcatcgatgtcggcgccaaatacgaaatctacggcgtcatcaatcagcttgccgaagcgggtaaagcggttatcatgatctcttcggagcttcccgagctgctggggatgtgcgacagaatctatacgatgtgtgagggggaaatcaccgccgaattttccaaagaagaagccgatcaggagaagctgatgaaatatatgaccatccgcatgaagagagggggagaagcgtatgcagacaccggtgcaaacggataaagaccgcgctcagcccggctactttcagctgtttcgcgatatgtataagcagaatatccggaaatacagcatggtcattgcgctcgtgtttattatgctgctgtttcaaatattgacagacggaattttgctgagaccgctgaacattacgaacctgattttgcaaaacagctacattctcattttagcgattgggatgatgctcgtcatcatcacgggacacattgatctatcagtcggttcagtcgccgcttttgtcggcgccgtctccgcgatgatgatcattgaaaacgatatgccgctgtttgcggcggtcgtcctgtcgttgcttctgggagcggcaatcggcgcctggcagggtttttggatcgcttatgtcaagattccggccttcatcgtgacgctggcgggaatgcttttgttcagagggctcacgatgatcgtgctggaggggaaatcgatcgctccgtttcctgtgtccttccaaaaaatggcgtccggttttattccggactggctgaacggaggcacgttccatttgacgacgattgtcgccggagcgggtgtgtcgattctttatctcgtatatcagcttcagcagagaaacatgcagaagaaattccaatttgacttgcagggaaaaggtctgtttacagttaaggtgttttttatcatcgccattatcaacctttttacctacattctcgcgacttatgaaggtatacctctcattttgatcacattgttcgtcttaatcgccgggtatacattcgttatgaaaaaaaccgtcatcgggcggagaatctacgcgatcggcggcaatgaaaaagcagccgagctttcaggaatcaaaacaaaacggctcacctttatggtcttcgtcaatatgggcgtcttagcagccctttcaggcttgatttttgccgcccgtctaaacgcggccactccgaaagcaggaaacctgtttgaacttgacgccattgcggcctgcttcatcggcggggcttcggcttacggcggtatcggcacgatcggcggggccatcatcggcggtcttgtcatgggagtcatgaacaacggtatgtcgctgctcggcctgggcatcgactggcagcaggcgataaaaggcctcgtccttctgattgccgttgcatttgatatttacaataagaataaaacttcttaattcataagaaaaacctgtttttgaacttcaaaaacaggttttttcattattgctggacggaacgcccttcctgattcagtgttggatttatttttttaggttccggcagcaggatgttcaaaatgcttgctaccgccaaaataacgattgaaaggtagaaagacaggttatagttgcctgtttggctgtaccagacgcccggcaaataagccccgagcgccgaaccgatctggtggctgaggaatagccagccgagaatgaacccgacggaatactgcctgaaatactgggttgccagcatttgcgtcggggcgacggtcgcaaagtcgaccaaaccgaacaaaaccgcgaagcaaagcaggagcatcgagttgtggctcgacaacagaatgacaagcgacagcgcccttacggcatataaaaagcacaaaattttccggctgctccagcggtcagcgacgacgccggaaatcaaaatgccgatgatgttaaacccggccagcaggctgacagcggcgcttgttacttcggtcgaaaacccgtggtcatgcgaaaaagggataagatgggtatccattaaccccgttgttgtaaatccgcaaatgaaaaacggcaagacgaggaaccaaaacgttcttttgagaaaaacggctttgtatggaatctttttcggctgggcgtccggctcttcttttatctcgccgccctgagcgccgccgatcggctgtacattcttttccgaaggatggttccgcaataacaagatgacgatcggaaatacaataacggctaaaaacaatcccagaacaatgacggtcactttccagttaaaccagtggatcatcatgagcgatccagggacaagcagcatctgtcccgcaccgaatcccgcttccatgatgccgaatgcaagcccgcgcttctcattgaaccaattggtcacgatcacggtcgacgcgacattcgacgcaccgccgacgccgagagaaacgatgatgccatacaaaataaacagctgccacggagaagtcacgagatatgtaaaaaagatgctcaagccgaccagaagcgtgctgagggataaaatgatccgcggtccgaagcggtcgacaagcctgccgatcaccggctgggacacgccatatacaatgaagctcagcatggaaataagcgaaatcgtgcccctgtccattgaaaattcctcttcccaaggctgaataaaggctccgaaagaaaggcgcactccttgaacggccaaaagcgtcaaaaacgtcacaaaaacgataatccaggcgtagtgtattttccgtttcatagatcctccatttcgtcagcctaactcggcatcccagcgttcttcccggagccgctgcccccataataaagtctcgtctttcacttccgtcagtctgaatccgaatttttcatacaaaggccgtgcttcggccatcgtgcttaccgtccataaaaaaatccgctcatactgattttctttgcaataatcgatgagatgctccaagaggcgtgtgccgactccctggtgtcgaaaagcggcgtcgaccagaaaccatctgagctgcacggtcctgccggggtgtttgacgagcccgacacatcccgcgaatcttccggcgctctctgcgatccagattttttcgatctcggcgtcgaatgtttcgtgaaggtaatccaaaaatgaatcgtcccagccgtgtgtctccgcgtagaaggcacgctgtttttcgatcatcagtttgatatcgtccgatatatagtaatctcttatagaaacggccgatttttcgggaggcaggtgttccgacaatatgcattcaattgtattcattgcctccgtcagcttttcctgatggcggccgtcgatatgcttcagcatgttttcgatttgttgattggctttggcctccagctttttataaatggattcaccgaagctggttaagtagatatagtggttgcggctgtcctcctcgcttctctttttatagaccatattttctttttcaaaccgcttcaggatccggctgacatagccccggtccaggccgagcgtatcttgaatcagtttggctgtacaatcggccgtattgtgaatttcaaataatatccgggtttccgtcaatgaaaaagggctgtcataaatatgttcattcagaaaaccgagcacatttgtatagaatcgattgaactttctgaattttaaagtgatagaatgattgatttctgtcatctcaaaacctctctccctgtaaatcgttgctttaatcaattataataaaatagttgatttagtcaagtgtatggaaatgaagttaaaaatgttaatgatagattatattttacaaataaagaaagataaattcaatcatacaggaaaattcatccaccaggcaggaaagaaggaagaaaacagagtatataatctaacaacctgtttttgaaagcgtttttagtgtcatgtccgtctccgcgtcatatgaaaacgaggaagaaaggatgaaactgtaggatggttaaaccgtatcccccgatcagccggaaagttccccgactattgcatggagccgattacaacccggatcaatggcttaaatatccggacgtattaaaagaagatatccgcctgatgaaactgtcccgctgcaatgtgatgtctgtcggcattttctcctgggtttcgctcgagcctgaagaaggaagatttacatttgactggctcgatcaggttcttgatactttcaaggaaaacggaatttatgcgtttttggctacaccgagcggtgccagaccggcttggatgtccaaaaagtatccagaggtgctgagaacggagcgcaacagggtcagaaaccttcacggaaagcggcacaatcactgctatacgtcgcctgtctaccgccggaaaacggcgatcataaacggaaagctcgcggagcgctatgcgcatcacccggccgtcatcggctggcacatttctaatgaatacggcggagaatgccattgtgaactttgccaagacaagttcagagagtggctgctggcgaaatacaaaacgctggaccgccttaatgatgcatggtggacatcgttttggagccatacctatatagattgggacgagatcgagtcgccggctccgcacggcgaggatgccgttcacggtctgaatttggactggaagcgttttgtcacggatcaaacggttgatttttgccggcatgaaatcgcccacgtccgttcgtttaaccctgatctgcctgtgacgacgaattttatgggaacgtatgccggattgaattattggaagtttgccgatttgcttgatgtcatctcgtgggattcttatccggcatggcacaacagccggcaggaagacagccggcttggagccgatattgcttttgttcatgacatcaatcgctctcttaaaggcggccggccgttcatgctgatggaaagcacgccgagcatgacgaactggcaggatgtcagcaagctgaagcgccccggtatgcatgaattgtcgtcattacaggcagtcgctcacggatcggacaccgttcagtattttcaatggcggaaaagccgcgggtcaagcgaaaaatttcacggagcagtcgttgatcatgaaggatcagagcatacgcgcgtttttcaggaagtgaaaaagctcggggaaaagctcgaaaagctggaggacgtcgcagggacgacagtcgaacccgaggccgcgattatatttgactgggagaatcgctgggctttggaagatgcccaaggtccgcgcaatatcggaaagcattatgaacggaccgccaaatcgttttatgaaccgttttggcgggaaggcgtaccggttgatgtgattcacatggaggctgatttctcccgctataagcttttggtcgccccgatgctctacatgctgaaggaaggcaccgctgaaaggattgaacagtttgttcaaaacggagggacatttgtcgccacttattggtcgggcattgttgatgagaatgatcttacgttcctgggagggtttcctgggggcttaagaaaaacgctcggcatttggtctgaggagatcgatgctcttcatgacggacagaaaaataccattgtgatggatgaagaaaacaggctcggattaagcggaagctatgaagccagcgagctttgcgatctgattcatttagaaggggccgaagcgctcgctgcgtacgaggatgatttttacgcgggccggccggcgctgacggtcaatttgttcggagacgggaaggcctactatatcgcttcaaggaatgaggcggcgttccaagaggcgtttatatccaggctcattgaagagtgcgggattgccaaagtgctcgatacagagctcccgaaaggcgtcaccgcccagctccgcacagacggccgccacgattatattttcgtgatgaattttacagcggaaagcagaagtgtctcgcttccggaggaaacatacacggacgttttaaagggaacccagaaaaaaggcgcgctcaaactgccgccttacggaacgagcattttacggagaagccataaggcctaggaagccttacttttcaggccgacgcttcgtgcaaaatgcagctgcaagcaggaatatgacagcagaagtgtacgccaatacaccttgattaaaaacgcagagaaacatgataaaaccgccaacatgataaacactacggcatagagatttaaacgcaataccatccctccattaatagttatcttaacataaaggaatgtgaaaaatccgcgggcatttcccgcggatccgtcgttatttggctcgttttttcagttttcggggattgacctgatcatcgatatcaggcttgtcgtccagcgcgtcagcaattttttcccaggagacaattttgaagttctgattggctggctgtccattttccgtattttcgccgtcttgggcgacaaagatgccgtatggatattttttgccgaggccgaagccgatgacgtcgattccatcggtatcgcttgtcccgtcgatttctttaccgtcatcaattgaaaaatcggtgacatagtcgtttttcccgcgccggtcatagatggcataacggttatcgccctgactggacgcgatcaaatatccttcgccgtcttctccgtagtaaatcgtcagcccttcaatatcagcggttaaatgcgttccgcctgcgcgatcgacaatttttcctttatctccgccgtttggctcagcgctgaaagaccaaatcgcagcgtcttcttcagcgatgtacattttgccgtattcatcatctgctgcaagcccttctgtttgagagctcattttgaatgagcggacctttttgccttcgacttgtccttttccgttgtcaaacagttcatattgctcgaattctacgttctttccggtcaccatggcgtagaacttgccggttttctggctgtgatacaggctgaaaccatacacctcctcaatatcggtttgaataggtttttgaggattgacgatgtttttcagcttgtttttttcgccgtcaaaggcgtatatttcaaccgtgtttttgccgtctgaccggtttgaggccccggcaatatcaatttttttgccatcgagcggaaaattgtagcggagatcgacgttgtttaatttgccaaacggataggctgccagctgttttccgtttaaatcgtaaacgatcaagccagattttttatttgttgtgatcagccggcttttttcaggctgcttcggatgaacccaaatcgccgggtcatctgccgcgtcgtcaggggtatccaccggctctgtctctgcatcggcagtcaccgagaagtccttataagctgaagcttcggcacgggggagaatgctccatgagggagacaataaggatgccgcaagagttgataaggcgagcgttttgtaaaagttcatatattaacctccttttgataacacttatactagcaaatcaatgaaaactatcatttgaggaaatgtaaacttttgttaaaaaagcggtggtttaaaggggctgtgagatttagtatacgaagccgcagagaaaacccccggaattctttccgggggttttgctttaacaggtattccctatctctcattaaatcgaaatgtatatatcctgcgaaaaaacagaagaaaaggagtatcagcctattgctttttaattaacacccttcataaatttctgaattttcggtgacagcagcatcaaaatgatcccgagcaggatggatacaccgccgatgatgccgaagtaggcgatctcggtatcaacgctgtaaaatctgacgatctgtgcgttgatggcctgtgcagaagcgtttgacaggaaccatagactcatcgtctgcgctgagaaagcagcaggagccagctttgtcgttgcggataacccgactggagacaagcacaattccccgagaacgacgatcaggaagctgagcacaagccacattggattggcaagcgattcagtgccgttgatgtaagcagggaaaatcataacgacaaatgacagtccggctaaaatcaacccgagtgaaaacttcgtcggcgttgacggctgacggtttccgagcctcatccaaatccatgcgaaaaccggtgcaagcacaacgatgaacaacggattcagcgactggaaccaagatgaatgcaattggacacctaaaaattctaaatgagtgcgtttatctgcataggtggctaaaatattggcgccttgttcctgaatcgcccaaaacatcatcgatgcgacaaacagcggaatgtaagccgtgagacgggaacgttcatcactcgtcgtcttggagcttttaaacatgacgatgaaataaatcagcgggatcaaaatgccgagacagctgacgatcatcgtaaacagcttgattgtcatccagcccataaagatggaatagccaaagatggcagcgatcaccaaaacaccgatcccgatccgtccgaacaccattttcctttcagctggtgtgagcggattcggtaccgttcttccggcagatccgaggtttttcttccgcgtcgctaaataggtcagcagtccgaacaacatgccgatggcagcaaggctgaagccgagatggtagttgtatgtctgaccgactgtgccgacgataatcggcgcgagaaatccgccaaggttgattcccatatagaagatgctgaaaccagaatcgcggcgggtgtcttcagggctgtacaaatcgccgacaacgcttgatacgttaggttttaaaaggcctgtcccaatgatgatcaagaacatgctgatgaagaaagcggggacgcttcccgggaatgacaaaagaatgtgtccgaacataatgagcacgccgccgtaaaacacggtgtttgcagttccgaggagcctgtccgctatccagcccccgataatgccggacatatagacgagggaaccatatacggccataatcgagttcgctgtcgtttgatcaaacccgaggccgccttttgtcacctctgtatacaaataatagataaggatggctctcatgccgtagtatgaaaagcgctcccaaaattcagtgaagaataaggtgaagagtccgcggggatgtccaaaaaaccccttttgcggaatgttttgaaaagtttctttttgatggtttgacattcgcaatactccttctctttctatgtctattataaaaatcatattcttatataatgttcgtgtcaatacaccttcaatcgatttgaatttttgatcgatgatgccacaagttgtgaagcgctttacaagcggatagaaaaaaattttgggagaaaatttggattgaaagattttttaataaaattttatctatttatgtacaagcggattttactagattggcatatatataaagcaaaccgttttacaaaaggaggctgaaaacagcgtgcagcagcaacctgatgaaatgagaatgacagtggttgacgcgacaaagttcggcgctgtcggcgacggcaaaacagactccacaaatgcgatcaacgaatgtttggcatggacaaagtcgatgggatacaacacggtgtggataccgaacggcacgtacatgattgacgggacgaaaaacggcgacccgcgggctccgtttcgcggcgccggcatcaatgttcccggcaatattgaaattttgatggacgcggaggctgtcatcaaggtaaagccgaacagttcatggggatacgctgctttttatataggcggaacatccgatataaaaatatccggaggcagcatcattggtgaaagagatgaacacacatatacaccggccccgaggccgacccatgaatggggattcggaatttgcatcgaaggggcgtcaaatgtcgtcattgaaaacgtgagaatagccgattttacaggagacggaatcattatcagcaacggaggagaagggtatagaccgtcagagcgtattcaggtaaccaattgcgatatcaggcgctccagaagaaataacttgtccatcacagggtgcgacaatgttcttgtagaaggatgcgaaattgcagatgcgggaacaggaaacggaaccgctccttgctttggcattgatatagaaggctatagtgaaggaagcatcgtctatgaagaacccgtcaatgtcatcatcagaaacaacgtgttaaaaggcaatgtcaatcatgccgtttccaacttcaacggtacttctgtcatcatcgaaggcaatgttgcagacggtaccatttcatacggctatggaacggggacgacgattgcaaacaatatcatcaagaaaaatcccgaattcaccgggcagagcactggaattaacggcctcggtgtaggggctttggaagaaagaagcgatgccgtaataaagggaaatttgatttccggttttacgacaggcatagatatccgcggaaaaagcgtttttgctgcggggaataaaatccgtgattttgtaaatgccggaattcttgcttatcaagcgtcgcaagtcttcattgaaggaaattatattgaaaacgacgtacctgaacaaaggtccggcaccgctttcagcatcacgcaatcagacaatgtaacatgttccggcaatcaaattgcaaatgtcgttcttgctgtcaggagcacagggaacgacgtccaaatcaagcataacgtcattaagcaattttccagaggcatatggatatctcaaggaaatgctgtaatagaaggaaactttatttcgccgaacggctttcaaacggtgccggagtcatatgctgtatccgtcacaaacacagcttcggcagttattcaacaaaacaccatcacacgcttcagaaactttccaatatacagctcgacaaatcagcatacaaaaattatcggaaactatattgaagattcaccgctgatcgtcacggtgtttctcacccgcggaacacacgaggttatcggcaatacgataacgctcagcaggccgtccttgccggctgtcctcatttatcttgaccaatcgtcggactcggcgatcctcaacaacacgcttcgaagcaatacggcagcaagagtaacggccattcaaaccaatacgtcaaggcaaacgctcatcatcggcaatacgattgtcaaaggaatgatccattcccaccaaacagatacagtcaatggaaatatcgaagtttaagctccctttggacagggagccttttatgtcctttttctcttttggcgaaagctttctgaggcttcgagaaaaatgataaccaaaaataaaagaatgatgatccactcgcccacttccaggatgacaaacgtcagggtatttaccacggctctttgcaaagtcatgccttgaaatacatccaggatgacggcaaaagcctctaaggaagcaaataataaaagcccgattccgattattttcaactttgcaccactctccgttccccgttattttttctcctttcataaagcactattcgcccgggaatagtataaatgtgcttgcgcaaggaaaaatatgaaaaacgaaaaggggattctgacagccatgccattcttttttaaaggtcgtcatcaaaaagataacaaacaagaatctctattgagcggagataagaacccggaaaccgtaaaagtgtctgggtttgtgcgtcccttgcttgccgaaaacctgagcatgattaaagaaatgaccggaaacagctccgatattgtcatccgcaagttaaaaacgggcgctggcgaaaaaattgaaatagccgtcgtttatgtcggcggcattacagatgagaaagcgattcacgattttttgctggaatcgatcatgaactccgaagaattggcggaaaaggagtacggcagggaggttcttgagacgattgcaggtgatgccgttgcactgggcggtgtcgaaaaagaaaagcggttggacaaagtgcttgaatctttgatggcaggaaatacgatcattttggcagaggagacggcagaagctgttattacgaccacgaaaggcggagaaaagcgctcgatcaaggagcctgaaaatcagcaggcattccgcggttcacgtgaaggatttatcgaagcgctcgacacgaatatttctttggtgcgcagaattattaaaaacccgaatctttgggttgaaaaaacgacgatgggaagcgtcacaaaaaccgatgtggcgatcatgtatatcaatggaatatgcgacccgaaaacggtgaaagaagtcaaaaaaaggatggaaagcattgagatcgacagcatccttgaatcgggctacattgaacagtttattgaagacaccgtatttacgacctttccgacggtatatcatactgaaaggccggatatggtcgcagggaatctgcttgaaggaagaatcgccatctttgttgacggtacaccgtttgtcctgcttgtccctgccgtttttattcaattttttcaatctgttgaggattactattcacgctttgacattgcgacattcatccgctttttgcgcgtattgatcttctttatttcgctgattgcgcctgccgtctacgtcggtgcgacgacttttcacaaggaaatgatcccaacggagcttttggtcgtaattgccgcgcagcgtgaaatcgtgccgttcccggctgtggtcgaagccatgatcatggaaatttcgtttgaaattttgcgggaggcgggcatccggcttccgaaagcgataggttcagccgtttcgattgtgggagccattgtcattgggcaggcggcggttcaggccgggattgtgtcgccggcgatggtcatcatcgtagcgatcacagcgatttcaagttttgctacaccttctttctccatggggatttccgcccggctcgtccggtttttcttcatattagccgcggcgacgacgggtttttacggcattattcttggactgatcatcatgtttgtccatttatgcagcctgcgttccttcggtgttccatatatgactcctttggcgccgtttattttgaaaaactggggcgacgccatcgttcgtctgccttggtggacacatgagaagcggcctgaactgatcggcaatgacaataaggtgcgccaaggagaataccagaaacccgagcccccggattcaggcgatatgaagacaaaacaagaagatggtgatccaaatgaaacgaatcgttaaaattgtgctcctacttgccgccattgtccttcttcaagggtgctgggataaaagagagctgacagatttgctgctgatcactgccatcggtattgataaaggtaaagatacagattacgaattaagctatcagatcgtcaatccgatcaatgtgacaggcggccttcaaggcggacagggaggagacaggccgccgatttcaagctattctgtgacgggcaacaatctgacggaaatgagcagacatgcgtcagcaaaaatgtcgcgggaaatttattactcccacaccaacctcgtggttgtcgatgaaaaactcgccaaggaggaaggcttgatcaaaattctggatgttcttgaccgggacaccgattttcgtacaacggcgacgattattatttcccgcggccaaaaagcgaaaacattcatccggacgctgacgccgatcgataagatcccgtcaaataaagtaaacaaaacgctgcaatttaccgaagagcatttgggagaacatatgaaaacgagcgtccaggatgtcatcaagtgcttaacatcgaaggcaaagcacccgattatttcttcctttaaagtaaccggaaacaaggaaaagggtgaaaaaatggaaaacgtgcagtctacatctcctgaggcaatagtcgaagcggacggcttggcggtcattaaagagggaaagctcgtcaattggcttgaaggcaaaacggcgagaggcgttttatggctgcgcaataaaatcagcagaacgtatttgacaattccaatgaatcatgagagagatgccgtcacatttgacgtcatccgccaaaaaacaaaaatcggatctcacctgaaaaacggcaaaccggcgatttcggttgacgtggctatggaaggggacatcggcgaaacaactgtgccgattcacctggatgatccaaaagtgctgagcgatatcgaaaggaaggtggcaaaggaactgaaaaatgaattgcagaatacgattgacattgttaagcggaacaagacggatgttctgcaattcggtgatgttgtgtatcgcacccaccccgaagtgtggaaaaagatggagggtgaatggagcaatcggtattttcctgacacagacgtcgacattacggttaatgcatacgtacgaagaacaggtttaagaaacaatccgaacattttgaatcatcatgaagggcgttcttgaatgaaagagagaggagggctttaaatggagaaagcaaaaatcagtgctgcacagctgttcgtgctgattgttctgtttgaactcagcagctctctgctgatttttccaggacaatctgccgaacaggacgcctggatcgcgatcttgttcggaacagtcggagggctggctttgtttatgatgcatcactttttctaccaggtgaatcccgacgcctctccctatgaaacgctgatgaatatttttggaaaaccggttggctggagcatgacatttatctacattgtttattattgttacattgcggcaagggttttgcgcgattttggagaaatgctgctgacatcggcttatccgaacacgccgattatcttcgctaatggattgttgattgcagtttgtatttttactgtgaggaagggaatcgaggtccttgcccgttcaggcgagctgttgtttggcatcatgttttggcttgctgtcacaggcctaatcctgatagtttcgtcaggcttgatcaaaccgaaagagcttttgcccattcttggaaacggacccggtccgatgtttcatgccgtgttcacgcaaacgctgtattttccgtttggagaaattatcgcctttacattgatcctgccgtatttaaaggaaaagaaactagcgaaaaaagccgggttgttgggaattgccatcagcggcctcatcctggcttttaatgtcgcattgaacatcagcgtgcttggcgtcgatctcaatatgcggtcgcgcttcccattgctgagtacgatccagacgattcaagtcgccgaattcttggacaggcttgatgtatttttcatgctcgtgctggtgattggcggtttttttaagatgagcattttcatgtatgccgtaaccgaaggcgtgaccgttttattcaagcttaaaaacccctccaaagttgttcatgtcatcggcattattattttgattttgtccgtctccattgccagcaatatttcagagcatgttaaagaaggaatcgagtttgttccattatatgtccatttgccgatgcaggtgatccttcccgcttttatttgcatagtcacttatgtgaaaatgaaaaaaaataaaaaaaaggccatgtaatggattgaccccgcccttagggcaccctttaacatgacagacgaggtgaggtttgatgctctatacggtaaaagaagtggctcgcttggcgaatatcacgatcaaaacgctgtaccactatcataaaatcggacttttatgccccgcggaggtgacggatgccggctatcgcctttacggggtaaaagagctggaacggctgcagcacatcttgttttatcgggagctcgaatttccgctcaaggcaattaagcaaatactggacggcaaagctgatcgactgacgattttgtctgagcagaaacgtcttttcactgcccgtttggacagaattaaacagcttatttctacgatcgatctctcgattcagcaggccgggaaaggagaagcaatggatcaatcaagcatgttcaaagggttttcaagcagcagggaatgggaggatgcgctcgctgaacaaaaccgctatttgaaggaggcgtatgatgtcgatttgctgaaaggagaaccagtcatagcggaagaaatgaatgaaaaagctgaagaggcggcccgttttatgaatggaatggccgaagcgctcagagacggagtcaaacacgaccatgaacaagtgaagactgcaattaaacggcacctcaagtttttgggaattacgcccgacgattttcagtcccagacacgcttctttatcgaagacgattttcatcgcggaatgcttgaaaatcagcaaacaggcctctcgtattatttggctgctgctgcagaagcatttgcttcataataaaagaaggggaacggctcatgccgctccccttatcctgctgatatgcgttttttgacggtaaagccgccccttgaaagcgtgatgttgacatcggatacctttgcgatctgttcatcatgggtgaccatgatgacgcatttgttttcttggtgggcaaggttttgaaagagccggacgatgtcttttgatgtatcttcatccaagttgcctgtcggttcatcggcgacgattaaatccgtgtcacagcagaacgctctgatgatggagacacgctgctgctggccgccgcttaatgtcaatactttctgtctggcctgcttttcgccgatgccgaccttttcgagcatctccaaagcgtattgttccttgtttttgacctgagatccggtgatttccatggccgacgtgatattttggagagccgtcatatacggcagcaggttataggactgaaaaacgatcgatacatattgattgcggaagctggtcagtccgatttttgaaatgttttctcctttgtagaggatgttcccctcttttggcgcgtcaagtccgcccgccaacgataaaaaggtggttttgccggaaccggaagtcccgacaatcgtatataagagtccttggctgaattgaatgctgatatcctcgaatagaggctgatcctgatttttataccaatagccgacattctgaaattctaaaatactgcccataatcttcacttctttctattcttgttttgttaaaatcgttttcggatggagccttaaaacagatatggacggaaggagtgtcgcgaacatcgcaattaaaaggccgattccgccaagtgccattaagttcccgaaggatacttgaatgtcgagctgatcaatggctgagacttgagcagtactttgtccgaagaagcctccgccgcctgggcccatcattccgcctgcagactggctagctgacgtttgttcgatttgctggctcaagagctggttcccgatttgctttgcaatcaggctgccggttaatgctgagatcccgatggcaagcactgcgatcattaagatttcggttaaaaactgtccgatgagtttccggcgtttttcgccgatcgccatcagaacacccatttcgtattttctctccctgattgacatcatgacgatcagtccgagaatcaccgccccggcgaccgtgacaagatagacgacatttttcgagaaggaggcgacattttcaatcgggccgaccatctgctggtacaactggtcattggcgtccaatgtgaatgtatccaaatcaatgcctgttttcttggcagccgcaatgaaagcgtcgatgttggaggcgtcgtccatattgtagaccgcttcatctatcgcgttttgataatcgtcgccttttaaggccgatgccgccgtatatggtgtatagattttgttataagggtttaaaaaggcgaagttttgcgcttgattgtctccggatgaagtcgttttatagattccgacgatttttaaattgatcgttgcatcttcatcgctgctcgctttgactttgatcgtatcgccgaccttcagctcgttttcttcggcaagcgtttcttcaatcacggcgactttttcattcacatcatcctttgttaaagcacggccttccgtgatcttggacgtcccgtcggcaaattcgtcgacgagggctgtgcttgtcacaccttcgattgatacgtcagcctgcatcatttgccggccgccctgttcattgccgcccgatccggccggctgatcgctgtttgagtccgttgaatcctcgtcaccgctttcgatcggatcgaagttgtccgctaaagcagatgttgaggagatgaagttatagcttttgacatggtaaaggctcgcaagtttctcggctgatttgagagaaacgggggtcgattcaaaccttttccggtctcctgagtcctgctgttctttcatcattttttccctgtcaactttgagcgtgacgctgcctccgagctgttccctcgccagttcgctcgatttcacggctgccgactggatcgtaattcctgtcagcacgagcacgcaaatcatcgtgaaaacaaacaattgtaaaagtgtttttccttttttcgctttcatgctccaaaaggctcgtttgaaaaaattcataacgcgtgattcctccgtatctatttcatttattattgctgccaaatctaacggcagcaggacttttgccttatgcttgatttcatcttagccgctacttatgaataaattatgaccaaactgttgccagacctttaaatgttcagaatggaattgagaaatggctgggccctatgtaaaatgaatctaacgtttgtctagcggaggcacttttacgatgaaaatattaatgattgaagataatttaagcgtatgtactatgacagagatgttttttgcaaaagaaggatttgaaacagagttcgtccatgacggactcgaaggatataaccgttttaaatcaggtgattgggatttgctgatcatcgatatcatgctgccgtcgattgatggggtcacgatctgcaaaaaggtcagagaagagagcacggttccgattattatgctgacggcaaaggatacggaatcagaccaggtgctcggttttgagctcggggctgatgattatgtgaccaagccgttcagccctttggcgcttgtggcgagaatcaaagcggtgagccggagatatcaaaacgccggccggcaggattccgctgacagcgacacgcttgaaacggaacattttaaaatcaataaaaaaacgagagaagtgtttttggacggcgttcaaattcaaaatttgacgcctaaggagttcgatttattgtattacttggtgcaaagcccgaaataggttttttcaaggaagcagctgcttgagcaggtttggggataccaattctacggagacgagcggactgtggatgttcatattaaacggctgagaaaaaagcttggcagcgactcgcgaccgtttctttacaccgtatggggagtagggtacaagttcgatgaagattaagtatctctatcagctgctggccagtcacatcagtatattagtcttggcttttctcatcacgggggcgctgttttcacactttgccaaagactttgcatacgagagcaaagtcgatgagctgtcttcctacggctaccgcatcatgggcgaaatggagatgcggccgaaaggagcgccggccattatgaagccgtttgaggaaattttgcgaagcaggaagatcagcttttttctgtttaatgaaaagaaagagatcttgatgacgccggccgatttgcggccgcgaaaactgctgctcagtgatgaagaatggaaagagcttaaagatggaaaggccgttgtcgtcaaaaccgactttaaccgttttaatgaggaagtatcggtcgtcgctctgcccaacatcgtcaacaatgaatttcagggaggcattctgctgaccgctccgatcagcgggaccgaagaaatgatcagcgacatgaaccgctttatgctctttacggcggcgggtgtcatcttagtcgctattctcttaagctggctgacgtcgaaattccatgtcgcccgcattcagaagctccgcgacgccacgaaaaaagtcgcggccggggattatgacatccatatcgaaaaccgcaataaggatgaaatcggtgatttgggcgacgactttaacattatggcccgcaagctaaaaagctcaagcgaggaaatcgaccggctcgaaaagcggagaaggcagtttatcactgacgtttcacatgagctgaagacgccgctgacgacgatcagcggtttagtggaagggatgaacagccagacgatacccgaagatcagcaggataaatgtatgaagctgatcacggaggagacaaaaaggctgattcgcctcgtcaacgaaaaccttgattatgaaaaaatccgctccaaccagattacattgcaaaagctgcattatccgctgatcgaagtgtttgaaatcattaaagagcagctggcgcttcaggcggaggagagacagaatcagctgatcctcgatgtggaagatcatgtaatggtcaatgccgattacgaccggctcatccagattctcgtcaatattacgaagaacagcattcaattcacaatgaacggaaccgtttggctgagaggccgggaagactacaaggagacggtgatcgaagtagaggataccggaatcggcattgatgaaaatgatatcgaaaacatttgggatcgtttttataaagcggatttatcacggacaaacacaccttacggagaatacgggctggggctgtcgatcgtcagacagctcgtctcccttcacaacggcacggtagagattgaaagcgagaaaaacaaaggaacaaaatttatcatccgcctgccgctgacggcgagagatgatgatgaatagaaacccgccagacagcgtctggcgggtttttgttaatctttaattttgaatttctgaatcaggtgctgcagctcttcggcgttttgcgcgaggatctgtgatgcggcggcgatttcttccattgaagcaagctgctcctgggttgccgcactaaccgtttgcgtgcttcccgctgcagtctcggctacttctttgacgccggaaatcgcggtttcgatttcgcttgtgccggctgtcaggtttttcaccaagtttgtcacatcattgatctgtgtgacaacctcagttatcgagttttcgattttttggaaagcgcctccggcttcatgaacgacgacaagtccttctttgacttcgccggttgccgaaatgaccgagttcatcgtctgctttgtatcgttttgaatgatcgtaatcaaccttgtaatctgttctgctgactgggccgattgctcggctaattttctgacttcatccgcgacgacggcaaagccttttccttgttctccagccctggccgcttcaatggccgcgtttaaagctagcaggttcgtttgttcagcgatgctcgtaatcacttcggtaatattcccgatctcatttgaacgttctgttaaatgtttaaatgcttctgaaagagaaacgaccgtttcattaatagactgcatttgtgcgctcactttatcaatggctttcgtgccttcaagcgacatcagcgccgtctggtctgcggtggcggctgccttttcggcgctagaagaaattcttccggcaaactcggtcattcccttaataacggttctgctgttttcaacgctttccacctgctgatcagagcctaccgcaagctcctggatcgtcgttgagcctttgtgctttcatcagcgctggcgctcaattcttgtgatgatgaagcaacttggtgggacgtttcgccgaccgtttcaatgatcgaacggacgcctgctaccattttgttaaacgatgcggtcagcaatcccaattcatccttcgattgatatgttcctttgacagtaaaatctccttgctctgtttctgcgaacagcgcctgaatgtctttgatcggctttgtgatcaaccttgtcattaagagtccaatcgagatggataaaacaagcgatgctgcgatcacaatgatgagaagcgtgatgatggaaccggcttctttagaatcccgctgatagatcgttttggcgttatcagcatttagcgtttgaatgtcttcaatcagctggttgaccgtttctctttgaggatccatctcttttagatagacatcatatgctttgtcattttcgttcttcaccgccaagctgagcatctcgctgctgatatcttgcaatttcttgtattcgcttttgaagctctcgtatttttcagagacgttgtccattaatttcagctgatcgatcttttccattaaggtgttgttttcttcgtttttttccttgatgtttttttgcaaagtatcatttcgatcgttgtctttcgtcaccattaactcgaatttgtacgtatcaagatcgaggttgttcgcttttaatcttgcaaacaactggttgggaatcaattgatcttgatagatcatctcggaacctttggaaagcttgctcagtccgcctaccccctggatgccgacaattgacaaagccagcgccgaaatgataatgatgacaaacagtttgcttctgatttttatatttctcaacagattcatatggtgttctcccatcaatttatttactttacatatcggctttcaaaacggttttgtgaatcaatttatggcaggtattttaagggaaggggatattttctgacaacaaaaaaaccccataaaaaaggggtttttttaaacgagaacttttgcgaaaaattcctggtataatgcgcggaccgcttgtttttcctgagcttccttaacgccgaacatcatgctgacttccgaggagccctggttgatcatttcgatgttgacgccggcttcagacaatgcttttgacgctcttgccgtcgttccgacgttatggcgcatggcttcgccgacgaccatgatcagggcaatattgtgttcaatcgctacttcatcagcatccaactcttccttgatccgtttgatcatccgtttttctgctgcttgatccatttgattctgccttaaaatgatcgtaatatcgtcaatgccggacggaatgtgttcatacgtcagctcttcatcttcaaggatttgcaggacgcggcggccgaagccgatttctcggttcatcaaatatttgctgatgtaaatgctgcaaaatccgctgtcgccggcgatcccgacgacaggtccgttcgtgttgtcgcgtgtggcgacaactcttgtcccttccgcgtccgggttgtttgtatttttgatctgaaccggtatgcgcgcccggaaagcaggaatcaatgcttcatcatgaaagacggaaaagccggcatacgacagctctctcatttcccggtatgtcagctcgcggatttctttcgggttggatacgatcgccgggttgacagaataaacggcgtcaacgtcagtgaagttttcatacaactcggctttcaatccattcgctaaaatggagcccgtaatgtcagagccgctgcgcgaaaacgtcatcacttctccttcctggctgaatccgaagaagccgggaaagataatgatgcccttttgctgtctcagctgaaacagattgtcgtaggactcgggcagcacttgtgcgttgccgggttcgctcgtcacgaacagcccggcgtcttttggactgacataatgtgcttcaactccccggtgcctgaagtaggccgctaccagtttggcattgttatcttcgccgcttgctttgatcgcatcaataaaccgttccggatttgttttatcaccttcgagcagctgaagcaggtctgcccggatccggttgatcacgtcatcggcaagcccgagctctagcgcgatatcggcataccgtccgacaatcgcctcaaccaggccggttgcttctttcgataataagtactgttgggcgcattcgattaacaggtcagttactttcgtatcctcgggatgccgttttccgggtgccgatacgacgacggccctcctttccggatcggaagtgacgatttgaaatactttctctagctgggctcctgatgcgagcgagctgcctccaaatttaacgactttcatttgttacatctcctaaagtttaaattttcgaaataaatttaattttaattattgcgctttttacaagaagaatcaaggtttttctttcaggaaagaacaaatgtgtttttgagaaggactcatcatagaggaatcgcacttcaacctttgtatctattaatcttattgactatgtcagaaaaaatggtaagatatataaaggcccttattgataatgataatcattaacgtcggcggagggtttgctttgttgtgcaaggaggctactgcagcatgaaattacgatacctattgctaatgctcatcattctttcattcagctcgatattcatcggcgttaaggagctttcgcctcttgaccttttccgctttaatgaggacgaaattcaaacgctttacataagcagaatcccgcgcttgatcagcatcgtgcttgcgggaatgagcttgagcatctgcgggctgattatgcagcagctgacgcgcaataaatttgtttcaccaaccaccgctggaacgatggattgggctcggctcggcgtgatcattgcgatcgtgcttttttcgtctgcagggatagtagtcaaaatactgtttgcctttgtttttgcactgtttggcagctttttgttcgtcaaaattttggacagaatcaagttcaaagatgcgattttcatccctctcgtcggaatgatgctcgggagcgttgtgagcgccatctatactttcatggcttatcagtacaatattattcaaaacgtcaatgcatggtttgaagggaatttttcgctggtcatgaaggggaggtatgagttcttatttctgagtataccgctcgttatcattgcctatctgttcgccaataaattcacgttggccgggatgggggagtcattttccatcaatcttggtttgaaatacaagcgggtggtcaatatcgggctgatcatcgtatctattatttcgtccgtcgtcatcctgacgatcggcacgcttccctttttgggattgatcatcccgaacatcgtgtccatttacaggggagatcatttgaaaaacagcctgcctcacacggcagttctcggagccgttttcgtcttgttttgcgatatagcgggacgtctcgtcatttacccgtacgaaatttcggttggtttgatggtcggcatcatcgggagcggcgtttttctttacttgcttttaaggagaaaagcctatgcgtcataaacagaaaatgcttgtactcatcgtgatagcagcagtctgcatcgggctgtttctgttctacggtttgccgtctgtatgggaatatgcgcttccgcggaggtttgccaaggtatttgcgatcatcattgtcgggacagcgattgcgtattcgtcgatgattttccaaatgatcacaaacaacagaattttgacgccgagcatcctcggactcgattctctctatgttctgctgcaaaccgggattattttctttttcggtgcagccaaactggctgacctcggcaaaaacggcaattttctattgtctaccggtttgatggtctgcttttcatttgtgctgtttttcctgatgttccgccgcgggggaaggcacatcttcctgctgctgctcgttggaatcgtgttcggcacattgttcagaagcctgtcatcctttatgcagatgctgatcgatccgaacgagttccaagtcgttcaaaacaagatgtttgccagcttcaacaatttgaatacggacattttagtgcttgcttcgctcgtcattctggcgattctcgtttacgcttggcggtttaatccgtactttgacgtgatttcgctcggcagggatcaagccgtcaacctcggaatcgattacgaccggacggtgaagaaaatgctgatcgtcgtcgccgttctcgtttccgtgtctactgccctcgtgggtccgatcacatttttggggcttctcgtcgtcaatgtggcccgggaggtatttaaaacgtataagcacagcgtcctgattcccggagcggttttgttcagcatcattgcgcttgtcggaggccagttcattgttgaaaagctgtttggtttaacggtgacgctcgtggtgatcattgattttatcggcgggatttattttatttacctgttgctgaaggagcgtaaataatgatagaagtacgagatatcatgaaacaattcggagagcagaccgttgttcatcccacgactttaacgatacaaaaaggaatgatcacgtccttcatcggaccgaacggagcgggaaaaagcacgcttttgtccatcatcagcaggctgatcggcatggacgccggaaaagtgctgattgacggcaaagaaatcggcgcttacaaaagcaatgatttagcaaaaaaaatcagcattttaaagcagtccaaccagatcaacatcaggctgactgtcagggagctcgtcagcttcggcaggtttccttattcacagggaaggctctcgaaagaggactgggcatatgtcgatgaagcgattgattacatgaagctgagagacattgagcataaacaccttgatcagttaagcggcggccagtgccagcgcgctttcatcgcgatggtcattgctcaggataccgactatatattgcttgacgaaccattgaataatctcgatatgaaacactcagtagagattatgaagctcttgaaagaccttgtcgaaaatcgcggaaaaacgatcgttattgtcattcatgacattaatttcgcctcggtttattccgacagaatcgcagccctgaaaaacgggcggattgtaaaagaggggccggcggaagacattatccaaacgccggtgctgaaagacatctatgatatggacattccgatccaacaaatcggagatcaaaaaatctgtgtatattttaaatgatgaggtgacctgaattgaaaaaactatctttattgattatggcattgataaccgttcttgtcgtagccgcctgcggaaacaaagctgctgacacagatgcaaaatcttcctctaaaaaagaaaccgtcacaattaaacacaacagcgacacaacagatgtaccgaaaaacccgaaaaaagtcgttgtcttcaactttggaatgcttgacacgcttgatgagcttggtttaagcgaccgcgttgtcggccttccgaaacaaacccttccgtcttacttgaaaaaatataaagacagcaaatttgaaagcgtcggcggactaaaagagccagattttgaaaaaattgctgagcttgagcctgatttgatcatcatcgaaggcagacagtctgaacagtatgacgagtttaaaaagatcgctccgacgatcgacattgagcttgaccagaagaactacatgaacagttttaaagaaaataccgaaaacattggaaaaatcttcggcaaagaagatgctgtcaaagaagcccttgcgaaaatcgatgaaaaagtagagaaagccaacaagctggcgaaagaaaaaggcggcaaaggattggtcgtcttaacgagcgataagcaaatcagcgcgtatggaagcggctcaagattcggcttgatccacgatgtgctcggcgttgaacctgtcgataaaaacatcgaggtttcccttcacggccaaagcgtctcttcagaatatatctctgaaaagaatcctgattacctgtttgtcatcgaccgaagcgctgccatcggcgaaaaaggaacagcaaaagaagtcatcgaaaatgaaattgtaaaatcaacaaaggcctataaaaacggccatatcacataccttgatccaggctactggtacctgtcaggcggaggccttgaatccgtatctgaaatggtgaaagaagtcgaaaatggattgaaataaaagagcgaggctgccggttcttatccggcagccttttttgtctgttcaaggagaagagggcagagagatgcaaagcgggttttcatgctcataacgccgcaagggccccagactcagttaagcgaatataaaaaaacacgccagttcgattgaactggcgtgacatgatcagcgggccggctggccttgtttgtcggcctgcggcttctttttcaatgtaaacgaaaggataaatccgatcagcgccaagacagcggccacgataaaggcggaattcatgccgtgaatgagcgcatttaacggatgagatgtcgcggcgtttttggctgaattactcatgacggaaatcagaacagccgtgccgatcgaaccgccgatctggcgcatcgtattgttcatcgctgttccgtgcggaatgaggtgcgccggaagggcattgatgcccgccgttgtgagaggcatcataatcatggaagttcccatcatccgcagcgtataaatgacgataataaatgtcagcgaagtatccatttgcaggtccgcaaacgggatggacgtcagcagcaagacggcaaacccgataatcgcaaggccttttccgccgatcttgtcaaaaatccggccgatgatcggcgacatgatgcccattgctatcgcgcccggcagaagcatcaaacccgaatcgaaagctgtcacgtctctgacgttttgcgtgtacagcggcaaaatggtctcagtaccgatcattaatgcaaaaacgatcataccaagtagcgttgttatcgtaaaagtccacgattggaaaacgcgaaactcgagtatcggccttttgattttcaattgtctagagataaagaagaacagggcgaccgcaccgactgcaaaggaaattaaaacagtattgctcccccagccttctgatccggcgttgctgaagccgtacaataaaccgccgaaacccaggctggacaggataatagatatgatgtccactgatgtttctctcaatttcgtgacgtttttcatcagcaagatgacaagcacaagatcaatcagtgcaattggcagaataatataaaataagtatctccatgtaaagctgtcgacgatccagcctgacaatgtcggtccgatggccggtgcaaatgcgatcaccaagccgaccatgcccattgcagccccgcgtttttcaaccgggaaaatcgttaaaaagatcgtctgcatgagcggcatcataattccggcgcctgcggcctgaatgatccgcgccgccagaagaaccggaaagttaggcgccaccgcaccgacgactgttcccgccgcaaagatgctcatcgccgcgatgacgagcgcgcggctcgagaatttttcgatcaaaaaggcggcggtaatcggaatgagaatcccgtttgtcagcatgaacgccgttgtcagccattgagcttttgtagcgtctatgttcaagtctgccataatatgcggcagtgcggtaaccaggagcgtttggttcaagatcgcgataaacgccccggcaataagcaaacctacgatgatatttctgttgtatgtctgttgttcagttcctgtactcatatcaatccctcttattcttttatactaatcgtttgtatttgtgaaacatcgtattggatggcctcgatttttccaaggtaatcaaggagagccttaattaaatacgtgcggggctctttgctgaaaagctcttcgctcagcaaatctgccgctgacagcagttctgtcacggcaaagtcgtcttgtgacagcgaagaaatcttggttttcagtttttgcaaaaggtcttcaagcaattcctcttttttgggcggtgcccagcatgatgagaaattcgaataggaggcaataatgtcttcatttaatgaacttttctgatcttcgttcagctttttctctatgaagaggtccagaactgacataatgaatggcggaatcgttttaacgtcaggctgcgcttttccagtgccgactaaaaacaggaattccctcatcagcccgtggaaaatgatgacgatatcccatataaacggctcgacctcttcgccgtacgcttgaatgatagagtctttatgccagctgataatcattgattttgtttctttcagatgctttttaaatactgcggtatccggagatgatccctcattggagatgaaattgataaattggcggttttccctgaattccgtaatctccaaagcgatttttttagcgaatctttctttcggcgtcagcgaggtttccgtattgatgacggcgcttttgttcagcatttcatgctttctgaacttgatcaatgccagcagaagatcttctttagattgaaacagtttataaatagatgcttttgacattttgcattcttcagcgatcgcttgcattgcaacattgtgatagcctttttgggcaaacagctttttggcggcccttaagactgctgcttttttttcgttcattccggctccttctttcgcaatgataaaactcatgggtcactaaaaaacccatgagttttcataaatgaaatattaacagaccgaacagtttcggtcaacgattttgttttgggtcacgatgaaggctgatccaatcagccgcttctccgtatgaaagcacgccgtccgtcatacgattgaaggcgccgcggcggatgatgtcttcaccgatctttttcaccagtgacagtgcagctctgaaaggggcggatccgcagctgatcctttcaatccccagttcggaaagaatctgtaaagagggggtgtgtgagccggccagcacgttgatcggcccggatataccttttctcagcccggcaatggtgcctgcatcatcggctccggggataaaaatgcagtccgcgcctgcttgactgtacccgatttgccgccggactgctgcttgaagacgggagccgggggcgtcagcattgagccagtacacatccgtacgggcattgattaaaacaggaaggttcagttttttaacagccgttattttttcttccattaatgtttcatcacacagcggccgacagggttctttcgttccgtcttcaatattaataccgacaaccccggcagctgcggctttttttgcgttttcagcgactgtttccggtgtttggccgtaacccgcttcaagatctgcactgacgggaatatcgacggcatccgtgatggttttcagtacggaaagcaatgtttcaaaggggagatgttcgccgtcgggatagccgagggacatggcaattccggcgctggttgtcccgactgctttaaaaccgcagttttgaaatgctttggcgctggctgcatcccatgcatttggcagaacgaatgggtctgactgatgatggagatccagaaatgtttgatactttgcaaatgatttcatgtattccactccttttttacatagtgtaaatgtaaagaccttcgatgctcatcgaaatgtggaatggaacgcatggaaaaaggctatcgatcaccgatagcctaaagcatctattcgagtttaaatccttgtttctcaagcatttcacggatgtgaggatagtacactttattgtaataagcggatatgccctgagaccagtttcttgtttcctgtccgttagtccgttttgtcatgtattcggatatttcttcatcgtacgcgtcgatcagcggttttaaatccggttgatacgtttcgctgtgccttaccgcttgttccgggaggcgcggctttttggcggagcggtccgccggatggccgacgacaagtcctgcgacagggaagacgtattcaggaatattgagcagtttgatcaactcttctgcacggccgcggaccgcgccgatcggcacagtgccaagtcccatcgattcagcggctgctgtggccgtcccgagggcgatgcctgcgtcgacagctccgacaagcacggattccattccgtctgtgatcgcaagcgtttcgccgtttttctcaagggcgattttcgcacggttgaagtccgcgcagaacaaaaggaaaacaggggcctgctcgatccagacctgtccgccggccagttcggcaattttctttttccgttcctcatcctgaaccgtaatcacggtgacctgctggccgttaatggaattcggcgcggcttgaacggcttgaataatgtcgtccagctgttcagggctcacgggctcatctgtatagctgcggattgatctatggtctttcaatgttttcaatacttcattcattagaaactcatcctttctttaatccgttgtgtgcgttttaaccacattcaggggttctgataaaaggtcgcccgcggcttgaacgaaagcttgaaaatgctctgtctgattatgggcgtcaagcgcgtcttgatccttccattgctcaagcatgacaaatgtattggcatgttcggtatcttcaaacagctggtactgggcattgccggcttcagctcttgaatgtttaagaagcggttgtacgctttcgagaaaggcgtctcgtttttctggttttactttcatataggcttgcaatacgatcattggatcaaacctccattatgtcatttagaattccttttcgtgtgcgttgtatacacagggaattgattgttcgaaaatcttcgaacaattgaatcgtaacatgtccttgcattgccggcaacccatttgcctccttgatgaattgtcttgaagttaggattatgatacatttaacccatgaaaacaaatgaaatgaagttaacagccgttctccaagccttgagtgatccttacaggcttgagattgtcaaagcattggctgacacagccgagaaaacgtgcggtacgtgcacaaatctcaatattgcaaagtctacgctgtcccaccacttcaaggtgctgagggaagcgggtctgctcaaagtccgcatcgaagggaagcatcattattactccctctgcaaacgggaattggaggagcagtttccgggactgatcgaggcggttctcaaggtagaaaaggaacggtggtaaacggaccagatgtcggctttttaaagccaggctgataccggcaggaaagaacctgccggtatttttaaagcttctcatcaccgcataccgcttcataaagcttggcagtcccttcgtcgatctgatcggcagcgattttggcgaatccgagcacgagcgataccgttccttcatgttttgtctgctctttctttaacgtaaaccgactcatgccgtaaacctcgacccgcctttcctttgctcttaataaaacctcttcttcacttctatccgtttcaaaatcggccacaaagtgaaggcctgcgctctcgcctttaattttgacccggccgttaaagtgtttgacaaggcttccgatcagccttgtccgctttttttcgtaaatctggttcattttcttaatgtgcttttggtactcccccgattcgatcagttcctgcagggcgagctgcgttaagacgctgctcgattgaatcgagaaatggtgcctttttctgtatcgcttcagcagcttttgcggcagtaccatatagctgattctcaggcccggaagaagcgattttgaaaaagtgccgatgtagatgactttttcagagcggtcaaggctttgcagggcggggatcgtatcgctcccgtatttaaattcgctgtcataatcgtcttccacaatatagcggtttgccccgtcggaaacccagtttaaaagctgaatcctcctcgataccggcataatgattcctgttggaaactggtgtgaaggcgtgacaaataaaacgtccggattcagacggtgaatctcgctgatccgcattcctttatggtcgagctgaatcgtggcgacttcttttccttcatttttcagcagtcgataaatgcggctgtatcccggctcctccatcgcatagacggctgaggcggggagaaggtcctggagcgtgtgaattaaggactgcgtccctgcgctgatcacgatttgttcggggagacatttgacgcctctcgttaaagcgataaagcgtgcgatcgtttggcgcacttcgtagacgccttgcgggtgcgtcatttctccgagttcgtcaacatgtgaagaaaccgctttctgttcgcagcgaagccatgttttaaacggaaaatgcgccgtatcgacgctcatatgggaaaacgagatccagccgtctttgctttcaggctcttcaaccagttctttttccaattgaaggggaccggggtgacggctggcgtggaacgtttcgatctgctctacaaaaaagccttttctttcacgcgaataaagataaccttctgccagaagctgctggtaggcggcgttgaccgaattgatgctgacgttcaatgtttcggcgagctctcgcttggatgggagctttttccccggcaaaaggttgcggctgaaaatttcttctttaatccgttgatagatttggtgataaatatattccgcgcccttagagcggtcaatcggtattgtgatcatagcgcctccctctggtaccatcaaaaattaatgattggtacttttcatcataccaaaaaatattcagaattataagaaataaaagtgggggagagattttttatgagtcggaacacaaaagcattcacaacggaagattggcaggccaaacgggatcaattcgtggcaaggggtgtctccaacggaaatcgtcatctggccgctaaaggggaaggtgccgttttatatgatattgacggacgccgttttatcgattttgccggggcgatcggcacattaaatgtcgggcattcacatccgaaagttgtagaagctgtcaagcggcagtccgaacagctcatccatcccggttttaacgtcatgatgtatccggcctatttggaattggcggaaaagctttgccggcttgcgccgggcgcccatgagaaaaaagcgattttcctgaactcgggtgcggaagccgtagaaaacgccgtgaaaatcgccagaaaatatacgaagcgtcaagccgtcgtttcttttacccgcggattccacggacgcacaaacatgacgatgagcatgacgagcaaggtgaaaccgtacaaattcggattcggtccttttgcacccgaggtatatcaggcgccgtttccttactactatagaaagcctgaagggatgactgatgaaagctatgatgacatggttattcaggcgtttgacgatttcttcgtctcgtctgttgctccggagacggttgcttgcgtcgtcatggagccggtacagggagaaggcggttttatcattccttcaaaacggtttgtgcagcatgtcgcagccttctgccaaaaacacggcatcgtttttgtcgctgatgagattcaaacaggctttgccagaacgggcaaatattttgcgattgagcattttgatgtcgttcctgatcttgtgacagtgtcaaaatcgctggctgccggcgttccgctcagcggcgtcatcggccgggcggaaatgctcgatgcggcggatccgggtgaactcgggggcacctacgccggaagtccgcttggatgcgtagccgctttggcagtgctcgatattatcgaatcggaacagctcaacaagcgctctgaagaaatcggcaaagccatcgaagagcgggcgcttgaatggaagatgaaatatccgcagattggggaagtccgccgacttggcgcaatggctgcgattgaaattgtcagggacgaaaagacgcgggagccggacaaagcagctgcggccaagattgccaagtacgccaatgaacacggtctgctcttgttgacggcagggatcaccggcaacattatccgttttctgtctccgctcgtcattactgatgaattacttgaggaagggttcggcatcattgaagaagcgctggaacagctctagtttgacatcttctaaaagaaggagcggattttgatgggtaaacagcaaatgaaaaaaacgatgtcgcagacggatgtgctatttttagcgatcggagctatgctcggctggggctgggtcgtcctttccggcgactggatttcgacagccggctttttgggcagcacgatcgcgtttatcatcggcggcatactcgtcatcttaatcgggttaacgtacgcggagctgtcttctgccatccctgaaacgggtggcggcttgattttcgtctacagggcgttcggacgaaaaacggcttttgtcgccgcttggggtgtgctgttcggctatgtttcggtgattacatttgaggcggtcgcattgcctaccgtcatcgattacgtcctgcctgtcgaacatcaggggtttctctggtcgctaagcggctgggacgtgtatgtcacttgggtgttgatcggttcgggaggtgcggtcgtcctgacagcgctcaattacttcggcgtcaagccggccgcgatttttcagtcggtctttacgattgcgattatcgccacgggctttctccttttgggcggcgccttggtaaacggtgatttcgaacatgtacagcccctttttaaagacgggttttccggtatgatgtccgtccttgtcatgattccgtttctatttgtcggatttgacgtcatccctcaggttgcggctgaaattaatgccccgaaaaaaatcatcggcaaaattttgattatttcgattatcagtgcggtcgtgttttatttgctgattgtattcggcgtaacgatgggtctgtcagaaagcgagcttgcgacgacttctttggcaaccgcggatgcaatggtcaatctgctcgggaaccagctgttcggcacggtgcttgtcctcggcggcgtcgccggaatcattacgagctggaacgcatttatcatcggcgcgagccggattctgtttgcaatgtcggaaaagggcatggtgccgaaatggttcggcttcatccatccgaagtataaaacgccgactaatgcaattttatttctgggtgcgctggcgttttttgccccgctgctcggacgccctgcccttgtttggatcgtcaatgcagggggaacaggtattatagtcggatatttgatcgtctcgattgcattcatgaagctgagaaaaacagagccggatttacacaggccgtataaaatcaataagtggaaaacaacgggtatatctgctatcctcttaagtgttatcttccttgccttttatttgccaggcatgccggccgcgctcacatggccgtatgagtggctgatcttggcgggatggacattgatcggttttcttttatacaacagcagttcaaaacgtaaaggggaggagattcaacatgaccagcatgctagaagtatataatcctgcgactggagaaaaaatcaaatcggttccccagcaatccgcaaaggaagtcgaagaagctgtcgtacgctcgcatgaggcatttcaaaaatggtcgaaaacatcggctgcagaacgagcgggcttgctgaaaaaatggtttgatttaattgtggagcagaaggacgagctggcaaaattgattacgcttgaaaacggcaagccgtacgctgaagcgcagggcgaagtcttatatagcgcaggctatatcgaatggtatgcggaggaagcgaagcgcatctacggaagaacggttcccgcctctgtgacgaacaagcgcatcatcgtcacacgccagggagtcggacctgttgcggcgattaccccgtggaattttccggcggcgatgatcacgagaaaagcggggccggctttggcggcgggctgtacctttatcatcaagccggcgcctgatacgcctttaacggcgcttgagctcgtccgtctcgggcacgaagcgggcattccgaaagacgtccttcaatgtgtgatcggcgacggacaagagatcggctctatttttacaagccatccgctgatccgcaagattacgttcaccgggtcaacacctgtcggcaaacatttaatgaaaaacagcgccgagacggtgaagcatgtgtcaatggagctcggcggccatgccccgctgatcgttgatgaagatgccaacattgacctcgccgttaagcagacgatgctttcgaaatacaggaatgccggacaaacgtgcgtctgtgcaaaccgtctgatcgttcatgaatcggttaaggatgaatttgcagaaaaactccgcgcggaagtcgccaagctgaaagtcgggaacggactcgaagaaggtgtatcaatcgggccgatcatcaataaaaacggcttccaaaaaatcgtcgatcaaatcaatgacgcggtgaataaaggggcgaaagttctcatcggcgccgaatatgaaagcgatgatgagaaatcatgctactttgtccatccgacagtgctgacggatgttgatccttcaatgacgatcatgcatgaggaaacattcggccccgttgcgccgattacgtcttttaaaacgctggacgaagcggtcaagctcgccaatgatacgccttacggtttagcggcatacttctttacggaaaactaccgccgcggcatctatttatccgaaaaccttgattacggcattctcggctggaatgacggcggaccgtcaaccgttcaggcgcctttcggcggcatgaaggaaagcggtatcggacgcgaaggcggactggaaggcatcgagccgtatttggaaacaaaatatttgtccatcggtttggatgaataacaagacaacatgaaaacccgcccgtatatccccgggtcgggttttttttacgtctttcatctgttcagcgtttattttatcctttttgggctgataggaaatataaaaaatgcctaaaagaagcagggcgatcccggcccaggaaacaagaggcagcgattccctgacaagcacggttcccaacagcgacgctgtaagcggttcagcaagcgacagcgtcaccgccgttgaggcgggcacttttgccaatcctgtcgtaaataacaggtacgcggctccggttgcaatgaccccgatatagaggctgacagccattccctgaaccgatgagatccagccgagatcgtacagaaacaacaacggggcaagcaatacagcgcttaaaaagaatacggtgcctgtgacagcctccggcttttgcttttgcaggagtttcttgcttgtcagcgtgtagacggcaaaggaaagaccggcgccaagtgcgagcagtatgccgagaaagctcccccccgatgaggcggagggaatgaataataaggctacgcctgctatcgctgcagcagttgcgatccaccatttcgtctgcggaacctttttgaacaccagccattcgaggcagccggcaataatcggagcgctgccgatggcgacgaccgttccgacggcgattcctgacaggctgacggctgaaaaaaagaaaggctggtaaaatgccatgctcaatgctgcgatgatcagcgttttaacgggccagccgcttcgtttcaattgaccgcggaaagccgcgaacaagagcagggtgatgccgccgacagccattctgacagcgccgaacacaagaggtgccgcctctttcggcgcaaatgcctgggttgttcccgtcgttccccataaaattgccgcaagcaagacaaacagaaccgatactttcatactaacgatctctccctactcgatcattcagaactttttctattgtaagataagtttgcggatttttgaatcgccgcttcggaaatttccctgaaaagaggaaatattcaacgctggccgaattcatataatggccaaaaaacaattaaagtcggaggaagcggatgaaaaaacgaacagttttattcttcttgttgatctggctcgccggatgtgcgagcgcccaagaggctgaggaacaaaccaaatgggtgaacagcgaacagaaagcgattgagaacggcattcgttatgaaagcattacaaaagacgatattatagacaaaatcgatttaaacggtgaacaagtcgtcgtttttcgattcggcgattcggagggagaggggattggcctcgcacacatcaaaagggaaaacggcaactatcaatggtaccgcgacttaaattacgcaattgtaaaatcggaccacccgaaaacggagaatgcggaagcttccgcgccgttcacaacccctaagggaagaaagtacacgttatatacaggggatgcagatcgcctgaatggtacatttgagactgatgacgggcttcatttggagccggtggtcgatcaaaaaacgggcatgtattatcagatcgtgcaggattcggactgaaatgaaacaaaaatgctgtcgggttgttcccgacagcatttcattttttacgatttctttttccgcactgtcaagagcagcgcagcacctccaagaagcacggcgaggatcgacaggatcagggaagcggtttgaatcccttgtcctccttgactgtcttcattttctgcggcagcgttttgtttcgttgaagcgccgtgtgcatcaaccgtttcgtgtccgagttttgcagcgtcgacaatgcttgtgattgcatgcggggtatcggcgtcatcatcaccggtccactcgacaattgtgccgtccttataatattggtatgcgttccaggcggccttttgttctttgtcagggtttttggcggtgaaggtaaactgctggaattcaccaggctgaatgccgccgttttcggcttcccacgtcacccttgttactttttcgtttttgccggtttcagtgcttgttttccaccccggcaccggttcatactgctgaaattcaacaccgtccggcatgctgagaacgaccttgatcgtggcgttgtctttttcaaccggtactttgacagtgtatgtttcccatgagcctgctgctgattcggtcggttttaccgtgacatgtgcgctgaccggcacggagaaaagcaaaaatgatgctaggattgcacccatccataatgtctttttcaacataatcaaaactcctttttattaatttttgcattgaaaactgttctgatttcctcaaatgacgccgttaatccgtgaacgcggatcttccagatgccgtcttcgcttaaatttaaatttttcgtttggaaaacaccgtctttatttttgctgaggctgaacgtgctttccttgtcatccccgaaaagcccggttttctcaacggttaattcaattttttggatatctttgacgacgtctccttttctgtttctgacggtgacttcaaacgtatttgagcccggcatgtttgggctgattcggagtgacagcgtatttccttccgtcagctgcttcgtctcactgaaaggctgcggcagcggcgcgggcggacttggaatattggtgaaaaccgccgtggtcagcagaatgagaagcccgaccgcccattcagctttcatcgaacggccgccctgctgtttcggcgcttttctaaaacgaaaatagtgaaatgccccgagtccgatcatgagaaggacgagcgccgatttcacaaggagcgcttttccgtaagccgtcccgaacaggttatccagtgtatgaacaatgaaaaagctgttgaaaaggcccgagaatatgagtagccctgctgaagcgagcgcccatggcgagaagcgccgaatggtttcccatatcaaacttttgtcaggcttcagccagtcttttccgaaaaacagcacaaacatcgcgagtccgccagtccaaatggaagcggcattcagatggatgaagttcatcgcgattgtcatatagcctgcgctcgtcgaagcggcatggccgtcgagcgatttgacgaacaatagtccggcaaaaaggaacaggctcaagatcgcgctcttcaggccttttctattcgaagagaaaacaagcaaggcgatgatggcgatgttgatcagccacagcgttccgcccgtcgtattcagaagcgtttcttttaaaagcgaaggctgaaaagccccgatccaggaaacgcctgcgtttgtttttgtttgcagtggcagctgaatgatgatggcagcccctgtcaataagagcgccacattcgtgatccgcttcagacggcgctttttgtcacccggccagccgttttcaggtcggtgccagacgagctgaaaaagagcggctcccatgaacagggagaaaccggtatacaaaaggacgcgttcaatgacgatatcggctgccggcaggcctgatgcttgattttgctgatctttcggcagcccgccttgaatgtttccgatactaaaagggatcgtgcctgatacaggatgaccgtctgcggatacggctctccattcggccgagtagatatcatcctttaacttcggtttcagcttgacggtcatgatctttgcgttttgggggtcgatttccgttttgccggaatctacccgttcacccgacgaatttctgaccgttatcgaatgaaacccgttctgaatcgcttcattgaattcgatcttaatttcttcaggcgcttttttcagctcctgattttcagcaggagttgattgtacgatataagcgtgagcaaaagcggcttttggcagcagaatggtacaaagaacagccagaactgcccagagtgttgctcttttcatcacattcatccaatctcttaacaaaatttcatgtcttcaggctgcagcagctgttcttcatcgttttctggaccagaagcgcggcatcgtcaaacgataacagctgtccgccaaagccttttttgaatttccgcgcttctgcttcagaagcgaaagggagcgcatgcggctcgcagcagttcaaatgaagatctgtatccagcaaaaagacggcagctttggcgctgatcgtcgtatccagcaaaaaatccctgcagataatctgtgatacatcatctttcactttctcatagcggagcattgcgcaatgcgcgcagcaaaactgttcaatttggctgtcgtttttgacaatttgcacggcaagcctcgaacctgccccttttccgcaaacgacgcaaagctgcccaagctgctgcttcggcttgtttagcgtaattccgcctgcggtcttgatgacctgcccgttttcaacgagcggtttaatgtcgcggtaaacggtcatttcagagacgttcagccttttcgaaatttccgaaatgcgcagagattcttcttctttgatccaagccaaaatctgctcccttcttttaatcggtagcattctcctcccccgttctttatgttctgtacttataagcctagtagattgaaggaaaagaaacaagcggaacgtgataaaaaatgtgatgaaatgttgaactttaacatcgcggccaaagccgttgaatcgtcgtcaatgggtactggtcaaaccgtcctgtttctaaaattttttgtcaggaaatgtaacaggtttgcacgctttagcgatgcaatgtgaaataataatccggagcaaagctgcagaggggaggggagaaaatggggaaacaaaggcttgttttaataggaaacggcatggcaggggttcgcacggccgaagagattttactacacggcgggagccggtttgagatcgtcatcatcggcagcgaaccacacccgggctataaccggattctgctgtcttctgtccttcagggagaaacggattggaacgatgtgatgacaaaaagccggagctggtatgaagaaaacgggattaccctttatacaggggaaacggctgtcgcaatcgatacggttaatcaaacggtggcgacagatcaaaaccgcgaaatcgcttatgacaaactgatcattgcgacgggctcttccccgtttatcctcccggttcatggtgcagacaaagaaggggtatatggttttagaacaatagacgattgccgggcattcataaacgcatcaaagcgatttaaaaaagcggccgtcatcggcgggggaatattgggccttgaggcggcgcggggattggcaaacctcgggatgaaggttgatgtggttcaccactcttcctccatcatgcagactcagcttgatccgccggcttctgccatgctccagaaagagctggagcgtcaagggatccattttcttttggagaaagatacagaggcgattttaggaacatcgcgcgccgagggtgtgcggtttaaagacgggacgaagatcagcgccgatctcatcgtcatggctgccggtgtcagaccgaatatcgaactggccaaggcgagcggtatttcaaccaacagggcgatcatcgtcagcgactatatggagacaaatgttccaaatgtctactccgtcggtgaatgcgcggagcataacggaacggtctacggcttagtcaagccactgtatgagcaggggaaagtgctggccaaacatatttgcggcctcgaatgttccggttatcagggctccgttcagtccgcggctttaaaaatgtccggaatcgacgtcttttcggcagggaaaatcacagaggacgactcgacgacggctattaaacttttagacgaagcggccggagtctataaaaaagcggtctttcaaggggataaaatggccggcgtcattttatacggagacaccagcggcagccaaaggctgttggaaagcatcatcaaacaaagggatattaccgttgtcaaaaaagagctgtttcaatcggaagaagacagttcagtcgcttctatggcggttcgtgaaacgatctgccaatgcaacgcggtttcaaaaggcatgatcatggaagcgatacagacgcacggtttaaagacggccgaggaggtcaaacgctgtacaaaagcttccgggtcatgcggcggctgcaggccgttggtcgaggaactgctcctccataccgccgaacaggataatcacatatctgcggcggaacaaccgatgtgcgcctgcacttcattcacggaagatgaagtcgtgaacgaaatacagatgagaaatctttcttccgttcacgaagtcatctcggcgctcggctggaaaaatagcagcggatgccggatttgcgtgcccgcgcttcactactatttaaaaatgatccgtccggacatcgcctatgaggagcacgaagaggagacggatgccatcatcccgcaaatgtacggaggccggacgaatgccgaagagctgaagcgcattgcaggagtgattgaaaaatatcaaattcaagaggtgtacatgacacaccatcagagattaaagcttgccggcatcaagccggagcatatagagcgcgtgaaagaagaactcggcatgccgtattgcccgccgcaacagcagcggatcgccgcggttaaaacgtgcccatgcggatcaccgcagattcaaacattggcagcagacttggaaaaagcagcagaatccctcctcattccggccaaggtctccattggggtgtcgggctgtttggacgattgcgtgtacgcttcagttcatgacatcggacttctcaaagtaaacggaggatgggagatttatgcgggcggccaaggaggacagcatgcttccccgggagagctgctttcagtagccgactcggcggaggaagcgggtgaactcatgaaaggcctgcttcaatattaccgcgaaacagcaaactatcttgagaagatcgggcattggattgaacgcgccggcatcattcatatccgggaagttttatttgacaacggacttcgcggccagctgatcgaacggcttgaaaaagaaaagcggctggctcagcaagaaacgataaaagggctgatgtgaaatgacagaacgattgctaaagtactttcgcacaaagcaaaaagaagtgcaatccgaaaaaacgtatgacacccaatgtccattttgcagcatgcagtgcaaaatgcagctcattgaacagacgattgtgacaagaaaaaaatacacggcggtcggaaaagacaatccgacgacaaaagggcggctgtgcatgaaagggatgaacgcccatcagcacgcgtttcattcagagagaatcacccatccgctgatcaaaaaaaacggcgaatttgtccgtgtatcatgggaagaagcgcttcagtacatcaaagaacaagtaacagcgatccagcatgaagacggccgcgatgctttgagtgtatacggcagcgcgtccattacaaacgaagaagcgtacctgctcgggaagttcgcccgcgtcgccttgaagacgaagcatattgactacaacggcaggctttgcatgtcggcggccgcaacagctgcaaatcaaaccttcggaatggaccggggactgacaaatgccctttccgagatcccccatgcaagggtcatcatcctcgcaggtacgaatatcgccgagtgccagccgacgatcatgccgtattttgaagaagcgaagcaaaacggggcgtacatcatcgtcattgatccccgcgaaacggcaacggccaagatcgccgacctgcatttgaaaatcaagccgggaacagacgccgcgctcgcaaacggaatgctgaaaatcatcattgaagaacagctgacagacggagcttttatcagagatagagctgaagggtttgaagaggtcaagcgccatgtagcatctttatcgcttgaagacatttcggccaaaaccgggatacaaatcgagcagatcaaaaaagccgcggtaaaattcgcccgcgaggagacgggaatgctgttcacggcaagaggggttgaacagcagactgacggaacggctgctgcaagaaatttactgaatattctaatatcaacggggaaaatcggcaaatttgcttgcggctacggcgccgtcaccgggcaaggaaacgggcagggggcgcgggagcacgggcagaaagcagaccagctgccaggttaccgttcgattgaaaatgaagccgaccgcgcctatattgcggatgtttggggcataaaagctgaagatcttccgggaaaaggcgtatccgcttatgaaatgatgaagaaagttcataaaggcgaaattacaggaatgtttttaatgtgttcaaaccctgttgtatccagcccgaacgccggctttgtcaaatccgctttgggtaaattaaagttttttgccgccgttgatttgtttctttctgaaacggcaatactcgcggatgtcgttctcccagcatcatcctatctcgaggacgaaggaacgatgaccaatctggaaggcagagtgacattaagggaagcctcaaagccgtgtcccggtgaagcgaggcatgactggcaaattatttgcgatatcgctaaagcgcttggaaaaggccgctatttttcatatcgatcggcagaggatgtttttaatgaattgagaaaagcgagccgcggcggaattgccgactattcgggcatcacctatgaacgtctgagaaaggaaggcggcattttatggccctgtccagaagaggggcaccctggaacacagcgcctgtttgaatcatccttctcccacccggacaaaaaagcaagaatgtgcgtcgtcccgaacgaaccaaaggtcaaaaaagatgtaccgactgaggagtatccccttattctgacgaccggaagggtgatgtctcactatttaaccggggttcagacgagaaggagcgccgcgctcaaggcgagacactttgaatcatttatggaaatccatccgaaaacggcggaaaagtacaatattggcgaccgggtgctggtcagggtggaatcaaaaagaggcagcatcatcgtcaggagcaaatggtcggaagccatcaggccggataccgtttttgtaccgatgcattgggcggattcgcaaaatgtgaacgatttgatagcggaaacgctcgatccgtcctgcagcatgccgggatttaaggtttgctccgtgaaaattcgtccgtcagttgacaattttgtgaataaattgtcataaaaagtcataaaaagtttacaaaattaactataatttgtgatagttttaaagatgtaaatagaatacttgtttagggcgtatagtgaattgttttgaaaaaggggaggatcatagtgaaaaaaaagcagcttgtccttgtagggaacggtatggccggggtcagggccattgaagaaattcttaaaatttcaaacgaagagtttcagatcacgattttcggcagcgaaccgcacccaaactataaccggattcttctttccaaagtgcttcaaggagatacggatgttaaggacattacactgaatgattgggattggtatgaagaaaacggcattcagctgtatacaggtgaagaagtcgttaaagttgatccggagtccaaaaccgtcatcacggatacgggaagagtccagccgtatgatgaactgattttggcgacaggttctctcccttttattctgccattgcccggagcggataaagaaggtgtaacagctttccgtgatatcaaggatacggatatcatgctcgaagcttccaaaacgtacaaaaaagcagcagttatcggcggcgggctgctgggactggaagcagcgcgcggacttctcaaccttggcatggatgttaccgttgtccacctcgcgccatatttgatggagcgtcagcttgatgcagccgcaggacggcttttgcaaaaagagctggaaaagcagggcatgaaatttttactggaaaagcagaccgaagaaatttacggagaaacacgtgtcgaaggcttaaaattcaaagacggctcaacgcttgaggccgatttggtcgtcatggcggtcggaatcaagccgaacgttcagctcggcaaagactgcggccttccggtaaacagaggaatcgtcgtcaatgattacatggagaccgaagttcccaacatttacgctgtcggagaatgcgcggagcataggggcattgcctacggacttgtcgcgcctctttatgaacaggcaaaagtgcttgccaaaaaaatctgcggcgttgaaacggctccgtatgaaggatctgttttatctacccagctgaaggtttccggtgttgaggtcttttctgccggtgactttaatgaggatgacggagaagacaaaaaagcgctcaaagtgtttgacgaacaggacggaatctacaaaaaaatcgttctgcgcggcaatcaggtgatcggcgccgtactgttcggagacagcagcgaaggaaacaggctgttttccatgattcaaaaaggagcggatatttctgatacttcaaaaatttcaatcttgcagcctttgaatcaggaagaaggcatgagcttgaccgctgcgatgagcgacgatgagatcgtgtgcggctgcaacggcgtttcgaaaggaatgatcattcaggcgatcaaagagcagggatgcacatcgacggatgaaattaaagcatgcacaggcgcatcgcgctcttgcggaggatgtaagccgcttgtcgcagagattctccagcatacgctcggctcagaatttgatgcttcagcacaaaaagaagcgatttgcggatgtacggacctttcaagagacgaactcgtggccgaaatcagagaaaaagggctgacccatacaaaagaagtcatgaacgtgctcggctggaaaacggcggaaggctgttccaaatgccgccctgcgcttaactactacctcggcatgatcaatccgaaggaatatgaagatgaaagagaatcccgcttcgtcaatgaacggatgcacgccaacattcaaaaagacggcacatattcagtcgtaccgcggatgtacggcggggtcaccaattcgaatgacttgcggcgcatcgccgatgtcgtcgacaaatatgaaattcctctagtgaaaatgaccggcggccagcggatcgatctgatcggcgtcaaaaaagaggatcttccgaaagtatgggctgatcttgacatgccttctggatttgcttacggaaaaacgctcagaaccgtaaaaacgtgcgtaggcgaacagttctgccgcttcggaacgcaagattcaatggctctcggaattgaccttgagaaaaaatttgaagggctctacacgcctcacaaaattaaaatggcggtttccgcttgtccgagaaactgtgctgaatccggcattaaagatatcggcgttgtcggcatcgacggcggctgggaaatttacgtcggcggaaacggaggcacacatctgcgtgcaggcgatctgttaatgaaagtcaaaacggctgaagaagtcatcgaaatcacaggcgcatatctccaatactatcgtgaaacagccaactatttagagcggacatctgcatggatcgaacgtgtcggcttgtcccacgtccaatccgtattgaatgataaagaaaaacgcaaagagctgaatgaccgcatcaatcaagcgctgtctgtccataaagacccgtggaaagactttttggaagacggaaagacaacaagacagctattcgaaaatgttgtcacttcctaaaatgaaaaaccaacttgaggaggaattcacatggtgaacaagaacttaacaaaggtgtttgtttcgaagatcggggatttgccgaatcagcttgggaagacagtgttcatcaaggacaaggaaatcgcggtattcaagctttcaaacggcagcgtccgcgcgattgaaaaccgctgcccccacaaagggggcgtgcttgccgaaggaatggtaagcggcgaattcgtcttctgtccgatgcacgactggaagatcagccttgaagacggcaaagtccaagagcctgacacggggtgtgtgcagacatacgaaacggtcgttgaaggcgaagatttgtatatcgtttattaaacggcgcaacaagcgaaacgcaatatttcaaaagccttaagggtcgcagaacgtgacccctctttattaaaaaaacaaacgcgttcacataatcggcagatggaaggatgacagttgatggggaatgggaaagtttattttgtcggggccggaccgggcgattcaggattgatcacattaaaaggaagaacgctgatcgaggcggcggatgtcatattgtatgacaggctcgtcaattcccggctgcttgagcatgcaaaagcatcatgcgaatttgtctactgcggcaagctcccggaccgccattatatgaggcaaagtgaaatcaatgcactgctcattgaaaaggggctgaaaggcctcaaagtggtccggctgaaaggaggagacccgagcgtgtttggcagagtcggggaagaagcggccgccgtcagcgaacacggcatcccgtacgagatggtgccaggcattacatcgggaatcgccgctcctctttatgccggactgcctgtgacccaccgcgatttcgcttcatcctttgccgttgtcaccgcccatgataaatcgggcaaaccggagatgaattgggaagggctggccaagggcgtccaaaccctcgtcttttacatggggatcaaaaaccttggttatatatgcgagcagctgatgaaacacggcaagtccccccttgttcccgcaatggccatccaatggggcacatggggccggcagcggagtgttaaagggacattgcagaatatcagggagaaaataaccgagcatcagatcaaaaatcccgcgattatcgtcatcggcgacatcgtatcattcaggcagaacagctggtttgaagaaaagcctttgatcgggctgaacatcatggcagtcaaaagctgtgaagaagaacaaattccagtggaggcgcttcgtgaacaaggcgctgaagttgtggaatggccgaaatggaaatcggccgaaacggtgcctgacgatgcacttttaggtcgaatcgcttgttttgacagcctgctgttcacctcaagtgcgtcactgcgcagatttttcagccggcttgctgctttgaagatcgatgtcagggaaatgcgcggaaggctttacgcttcagatcagcatgtaaaagcagctcttgaagaacggggatttgaagcctttctgcaaacggaaatgccggtctcgggcagctgtttgctgatcggcagccgggaagccgtgcaaaattacccgcactccgggtgcgaggtattgattacacatgacagggtgatcgacagccgctttacctcgatcatcaaacgggaaattgatgagtttcctattgatatagtgttgttttcaaatcgaacatgcgtcgagctgttcgtaaacgaggcggagacagtcggcctccatccggaaaaaacggctgcccgtcttcaggcgttctgcctcactgaagaagcgggggagagagctgcagccgtagggtttcagcgcgttcatgcagtgaatgatcgcgatcgcctgccggatgtcatcaaagagatcaaccgaacagccgaatttgtctgtcagagctgaaaaaagcagggggaaccctgcttttttagcgtgcggcactgcttctgaacaacacctcttttaagtagcaaaggtctgcctctatatgcttcctcattgattcggctgcttttgcgtcatttctgtcctgcatgtgacgcagaatctcctcgtgctgattgatgatttcaagagtgcgctccggtttttcaaggtttttgctccggtagaaaaaggtcagcgaccgtaaatcaagcagctgtttttgcaggcgttcgttttcgctcgcttcgatgatggcatcatgaaattgcgtatttaggcgaagcagagcattagccgactccggaccttggcttttctggtgcttatgcgcctcagagagcgtttcggaaatgagctccagtgtttcattagaggcaaggcgagtcgccaaagaaacggccagggattcgagcgcctgacggcattggtatatttcttcaagatctttgattgtcggttcataaactgtaatttttgatttatcatctatcaataacaggccttcttgttcaagtgtccgaatcgcctctctgacggggctgcggctcacttgcagctccttggcgattttggattcatagatccgttcgccgggctgatatcctcctttaataatcatatcttttaaataatgatggacttgatcatgataagagactgcacgttggatcgaaaacttcacgctgttcacctcgtttatttttcactgcggaaatcactaatagtctagcaaaaagagagaaataccatcaatctaaaattaccataatattgagtattttgtgacaaaaaagtgttgactgccattagctgtccgttataattaagttataactgtcgacagtcggcagattactttttgattattattgtaagcgctttatagatagaggggaagggggagttttttatgaaatcaagcgttgtgtcagcatgggatatgctttggagatcacaccgggaagcaaagaggctgcttttgttcgccatgcctgtcagggcgggaaaagatgccggtttaaagataaattcggaacaaaccatgaaggaagagaagccgccgagctataaaacgcctcaaaaaatcgggctgctgcttggtcctgcattgtttttcgctgtccttttgttcttttttcccgagggtctgagctatgaaggtagaatggtattggcgactactttgtgggttgcggtttggtggattacggaggctgttccgattccggctgcatcattgctgccgatcgtgctgcttccgctgacgggggcgctggaaggggcagctgtcacgtcgagctacggcgatccgatcgtctttttattcttagggggcttcttgattgcacttgcgatggaacgttggaatctccataaacggattgcgctcaatattatttctgtagtgggcacgagcacctcgaggatcgtcctcggttttatggcggccacaggatttttgtctatgtgggtctcaaatacggccgcggtgatgatgatgcttccaattggaaccgctatcattcatcaggtatcagctgtcataaagtctgaaagaaaagatttagccgcagaagaggcgaaattttcaaaagcgctgatcttcagcatcgggtatgcggggacaatcggcggactcggtacgctgatcggcacgccgccgaacattattttggcggccaatattaagaagctgtacggagttgaagtgtctttcggcggatggatggcttttgccgttccggtcgtcgtcattttgcttgtagcggtatggctgtacttgacgaaagtggcgcatccgatcaagatgaaggagcttccgggcggaaaagaattgattctcgaagaaaaaagaaagcttggaaagatgagttttgaagaaacaatggttctgctcgtcttcgggtttgccgcgtttatgtgggtgacgagaacgtttttatgggatgacaaaataccgggtattgacgatacaatgattgcgatattcgccgcttcattgctcttcttgatcccttcgctcaataaagggggcagggtattggactggtcggtatcgaaggacttgccgtgggggattctccttttattcggaggaggcttggcgctcgcaacaggttttaaagaaacgggtctggcggagtggatcggcggaaggctgacggtattggatggatttaactttgtggttattgtcatcatctcaacggcattggtgctgtttttgacggagattacgtcgaatacggctacggcgaccatgattctgcctgtactggcctcgctcgctttagcgctgaatgttcatccgtacgcattaatggtgcctgctgcaatggcggcaaactgcgccttcatgctgccggtcggcacgccgccgaatgcaattattttcgcatcgggcaaattgaagatcagcgaaatggttcgaaccggctttgtcattaatattttcacgctaattttaatcgtcggagctgtgttctacattcttccgcatttatggggagtagatctgaccgtcttccccgacaatctgaaatcgaattgatgaagcgaagccggagcttaagccccggcttttggtcatggtgaagcttgcaattgatcgttcagcagccatttaaaaagagaaaaaaagaaactgctgaaaaaaggatgatcagcatgaacaaccctgtactgccgcatcgatatccatttctattcatagattgtgttgtagagagtgagccgggaaaatgggtgaaaggctataaattcataacggaaaacgactggttcatcaccgaaaatcaaaaggaaatgccattttcatcttaatagaagcgctggctcagaccgcagcatttactgcgttgaaagaaccggctgaaatcggctttctgtcttcggtgaaaaaagccgaatgcaccggcaaggccgttgtgggagacaaacttgatctatactttgaagtttcccgctataaacgggggtttttattcggcaaaggaaccgcctcagtaaacggaaaacctgcagtgaaagcagagatcggaatttttatggagcaaagtgaaagcgggggagaagattgatagaaataaagcctgtcgcgtttgtggaaaacttgcggactttcccgaaggatgatcattggggcgatgtgatttctgaaattaagttggctgaaggcatccatccggacgctttaaaagggatcgaagaattttcccatttggacattatcttttactttcatcaagtaaaagaggaacacattcaatataaggcgaggcgcccgagaaacaataaaaactatcctgagacaggcattttcgcccaacggggaaaaaacaggccgaacaggctcggcgcgaccgttgtcaccctccttgaaaaatccgggagcaagcttgtagtgaaagggttggatgcgattgacggaacacctgtaatcgatatcaaaccggtgatgaaagagtttctcccgaaaggacaaatcatacagccgaaatggtcggaagatttgatgaaagtatattggcatgcagctgattgatagaaaaaacctctcaacaccttctgagaggttttttcatgcttatacgataaaaaagaaggatatcagaccaatcttgaagatcggaagtcccatgaattgtgcccaatcggcaaacaaaatgaaagcgctttattatatgatgtcaataaggggtcgcaaaaatgatcaacgagaaacgtcctgctcaattgctccaatatttgctgcgtgtcagagaggcgacaatgcatcagctgattgatcattttcaattatcgaaacggcaaatctgctatgacctggacaaaatcaatcattggctgaccggcaagcagctgcctgaaatcgaatataaaagaaagaacaggctggccgttccggaaacattgcttgaattgcggttctccgaagcctgttcagacatcggccgctcgtttatttttacgcaggaagagcggatcaaggccttgtacatgtttctgtttgtccgcagggagccgatttcatccgctcatctgacacagctattgcaggtcagcaaaaatacggtcatgaatgatgtgaaaaaagcgaatgaggcgctgactccgtttttagtggcgatcaaatatacaagacagcgcggctatcatttaataggaagcgagtttgataaaagagttcccgtcatgcaccacctttcttctttcctgcaaaagccttacggcaaagaaatccttcattatattttaaaaatttccggctcgcgcgatcacaaacaacaagaatttaaaagagcggttgaacttgtctcaaaagaatacgggcttcaactcgtcgaagaaaggcttaatgaatttatctactttctgatgatgtattcgatcagagtggccgaaggaaaaattgtccgttttcaccaggaggagggtgagcttttaaagcaaagtccgctgaaaaacgcagccgtaaggcttgtgaatgagcttcggattcccgttcatgaaacggaactttgctacattttgatccagctgctcggtctttcattcggacagcagccggcacatgatccgctttatcagctgtgtgaaaaacttgtatttgaatttgaatcaagagcatgcatcacatttcccaggaggcgcgaggtggcggaatctctttaccggcacttgaagccggcatatttcagaatgaaataccgcattccgattcacaatcccttgctcagcaaaattaagaaagagcataaagaactgtttaccatcgttcaaaagctgatgcggcaccttgaagcgctgttgaacaaaccggttccagaggaagaaatcggctttatcacaattcattttggtgcattgcttgagcagccggtgcagtccgggtcatccaaaaagacggcagtcgtcgtctgtccgagcggtgtcagctcatccttaatggtcaggcgccagcttgaatcgttattttcagagattgtcgttgagaaagcgatgtctttgcaggaattcacacctgacgtctttgatcattatgatgccgtgttttccaccgttgagctgaaaaccaaaaagcgatactacatggtcaggccgctgatgacgcccgctgaaaaaagcaggcttgtcaatgaagtgtatcaggaaatgttcggtgtgaagcaaagggagcttttgacagacgaatttcttcacatcctcaagaagcatgccagtatcatagacgaaaaaggactaagagaatcattgaaaaatattgcatttgttcaaaaagtgacggaaacaagggggaaacgaccagtgctgaaagatcttctgacagatgaaaccattcaaatggccgaacaaatcaaaggctgggaagaagcgattcaaacagcggcaaagcctttgcttgataaggaggtgatcttgaaggaatacacggatgccatgatcgacaatgtcaaaacgatgggaccttatatgattatcggccccgagattgccatccctcatgcaagacctgaaaagggcgtccaaaaggtgggaatgagtctcctgaaactgaaggagccggtctattttttggatgatgagcagtatccggtaaggcttttgttttgcattgcggcggttgaccatacgacacatctgaaagcactttcccaactgacccggcttctcagcaataaagaaaatcaggattccttaaaggaaaccgagtcgttggagcatatcaaacgtttaatcgaagcctattcatccaattaaaaacaggagggataatatgaagatattggcagtttgcggatcaggactcggaagcagttttatgctggaaatgaatattaaggatattttgcaggaaatggggttaatggagatcgaggtggatcattcggatttgagttcagcgtctcctgatcaagcggatttgtttatcgttgccaaagatatcgcagaaggagcggcccacctgcgcgatatcgtcgtgcttgaaagcattatagacatggatgaactgaaaacaaaactggttaaaacattgcaggaaaaaggagtgctttaatcacagaaaaggaggaactgcaaatgggtgaaagagcactaaagctgatgatggatgtgttaagccagccggctgtattaattgcagccatttctcttatcggtcttctgcttcaaaaaaagcctgccaatgaaattgtgaaaggggacgaccaaatcgtttttaggctttatcgtgatttcagccggggcgggcatccttgttggctcgcttgagccgttcggaaagatgtttcaagcagcctttcatgtgaacggcgtcgttccgaacaatgaagcgattgtcgcgatggcgctcaatgaatacgggacggcaacagcgctgatcatgtttttcgggatgctgtccaacatcttaattgcccgttttaccagattaaaatacatttttttgaccgggcatcacacattgtatatggcatgtttaatcgccgttatactggcggtggcgggtttgaagggcccgtttttgatcggcgtcggagctgtttcgctcggcttgacaatgagtttgtttccggcgatggttcagccttttatgaaaaagataaccggcaatgataaggtcgcgttcggccatttttcttcaatcggttacgctgtgtccgggttaatcggcaaagcggcaggcaagggctcgcgctcaactgaaaaaatccggtttccaaacggcctcggatttttaagggacagctctgtcagcattgcgctcactatgaccatcttgtacgttttgattgccttatttgcaggggcgggctatgtggagcgcgagttgagcggcggtacgcattatcttgtcttctccgttattcaagcggtcacatttgcggcaggggtgtttattattctttcgggagtcagactcgtgctcgcggagatcgttccggcttttaaaggcatatctgataaactcgtaccggattccaagccggcactggattgtccgatcatttttccgtacgcgccaaacgccgtattaatcggctttttttgcagcttcattggcggcatcaccggcatgctgattctcggagcggccggagccgtcatcgttcttcccggagtggttccccactttttcacaggagcttcggccggcgtattcggaaacgctgcaggggggatacggggagcggtcttggggtcttttgtcaacggtctgattatcacgtttttccctgtgttcctgctgccggtcatgggtgatttaggctttgccaatacgacattttccgataccgattttgccgcaacaggaatcgtgcttgggcatgcggtgaaactgctgggatctggaggcgttgtaattggaatcgcagcggtagtggttggcgcagtcttgttcggctttaaacgcggaaaggcggaaaagccagatcagaaagtcgaagcataaaggagtgggcaatgatgtcagtaagggaaatcgatatggagcgttttcgtgatcaaatcaggctgctgacattgaaacagcttcatcacctcggctttggacattatggtggcagcttgtcaatcgccgatgtgttggccgttttgtatggaaaggtgatgaaaatagatcctgccaatccgtcgtgggaagatcgggacttctttatcctttcaaaagggcacggcggccccgccttatatgcagcgcttcatctttccggctattttgaagaagatgtgctctatacgctaaaccaaaacggcacagctcttccgtcgcaccctgaccgaaatttaacaccgggagtcgatatgacgaccgggtcgctgggccaggggatctcggctgcagcaggagtcgcgctgtcgcacaagctttcaggacgcgctaaccgcacctttgtcattgtcggcgacggggagctgaacgaaggccaatgctgggaagcgatccaatttgcggcgcaccataagctccgcaatctttatgtgtttgtggatgataataaacaacagctggacggcccgacgaaagagattatcgatccgctggattttgtcagcaaatttagagccttcgggttttattccgaaagggtaaacggacacgaaccggaagcgatttatcgtgcggtcaaaagaggagaagcccagcgggaaaggccggttgccgtcatccttgatacggtgaagggaaagggcatcccttattttgaaaaaatggagaacagccaccacattagagcaaatgaagagcaaaaccgcatgatcgaaaggatcattttgacgcttgaagaaaaggaagtgagggcatgaatgaggcggcaaatgtagagctggacgctgttgaaatgaggcaggcatacagctcagccgtttatgaactggctcaagaaaacacggacatcgtggccttggaagcggatttgatgagctcgatctccatggacaaagtcaaacggcgcattcccgagcaagtgatcaattgcggtgtcatggaagccaatatgatagggattgcggccgggctttcgttaaccggaagaatcccgtttgttcacacgttcgctcagtttgcgacaagacgctgttttgaccagctgtttgtttcaggtgcatatgccaaaacaaacattaagattctcggatcagattcgggaattacggctgaacataacggcggaacccatatggcctttgaagatttgggactcgcccggctgatcccaaacgcctttgtttatgaagcaagcgatgcggcaatgctcaaatttttgatcaaaaaggctgcggcagagtacggcattcactatatcaggacgatcagaaaaaaggctgtcaggctttatgatgaacacgaaacattcacagacggaaaagcaaaagttctcaaagatggcagcgatgcggcgctgtttgccagcggcatcatggtcgccgaagctttgcaggcggctgaactgctaaaagaaaaaggaatcgatgcagcagtgatcgatatgtattgcatcaagccgattgatcaagaaacggtggttcgttatgcacaaaaaacgaatgcgattgtcacggctgaaaaccataatgtcataggcggattgggaagcgcagttgcggaagtgctgagtgaacattatcccgcgccgcttaaaagaatcggggttcatgaagccttcgggcaggtcgggacaatcgattatttgaaaaaatcttaccgtttgaccgcagaacacattgcactggcggcggaacagctcgtttaagatttctttgtcctggccgatttttatattagaatagataaaagcctaaaaaaagtggaggtatcttaaatatcgtgtcagtcagtcaaagaaatcgaatcgatgtgaagctagtagctctggatatggatggaacactgttaaatgacgaacaaaccatttctgatgaaaacagaaaagcgattaaagaagctgaggaaaaaggggtttatgtcgtgcttagcaccgggcggacgctgatgacgtgccgggagttggcggagtcgctcgaactgtcttcttttttgatcacggcaaacggcagtgaaatctgggattcgtctttcaacctggtcgagcgccagctgcttcatcccgatcatgtccaaatgatgtgggatttgcgcaatctgcacaacaccgatttctgggccgccagtgtcgataaagtgtggagaggcgagtttcctgaggatatacaagcgtatgaatggctgaaattcggctttgatattccggatgacgacgtcagaaaccgggtcctggaagagctgaaaaagaacaaagaattggaagtcaccaattcaagcccgaccaatattgaagtcaatgccatcgggatcaataaagcggccgctttggcaaaagtgtgcgagcgcctcggctttacgatggaacatgtgatggcggtcggagacagtttaaatgatatcgccatgatcaaagaagccggtttaggtgttgccatggggaacgcccaggaaatcgtcaaagaaaccgcggactggattacagattccaatatcgaacacggagtcgcaaaggcgatcaggcattgggtattgtcctagccgaaaaaagagccgatttgcggctcttttttttgtgcaaaataaaaaatattcatggactgaagcaagctgaaaaaccttgtgaaatcaggtttttcagctaaagtttttaggtataacgatttattttatgtgaggtttcctaacaatatgatgccaagcgggcaaatccttgatataatcaattcaagtttgattattcggaattaatgttccgaaaatcggaacaaaacgagggatatactaaaattcgaccgaatgtgcatcaatatataggggggatttgatgaatcaagttgatttaaactgcgatcttggagaaagcttcggcgcttataaaatcgggctggatgaggagattctcgagtttgttacatcagccaacatcgcttgcggatttcatgcgggagaccctggcgtcatgcgcaaaaccgtcaaaatggcggcggaaaaaggcgtgaaaatcggcgcgcatccgggacttcccgatttagcgggattcgggcgccgcaatatggcgatcacgcctgaagaagcatacgatcttgtcgtgtatcaaatcggtgcgctttcaggatttctaaaggctgaaggcgtgaccatgcagcatgtgaaaccccatggcgcactatataatatggctgcgcaaagccgggaactgtcggatgcgatcgcgcgcgcagtttatcaaacagacccggaactgattttattcggtttggcgggaagcgaacttgtgcttgccggtgaaagagccggtttaaaaacggctcacgaagttttcgccgaccgtacatatcaagaagacggaacgctgacttcccgccgccagaatgatgcgctgattcaagatgacgatgaagccgtcggccaggtgatccgcatggtgaaagaaggcaaggtccgcagcctgcagggaacggatgtcatccttaaagcagatacggtgtgcattcacggtgatggtgcacacgcgcttcagtttgcgaaaaaaatccgccgcgaactcagagcagcagatattaaagtacaagctttttctacatgatgttgacaaaaggaggaataccatttgaaacaaaataaaaaaacaaaagcgccggcaggcaactggacgttgcttttgggcgccgcttttttaatggccacatctgcaatcggtccgggatttttaacacaaaccacagtatttacacaatctttggccgcaagcttcggctttgtcatcctcgtttccatcattttagatattttcgcccaaaccaatgtgtggagaattattgcggtttctgaaaaaagagggcaggaaatcgccaacctcgtcttaccgggactcggctattttatcgcctttcttgtcgttctgggcgggcttgccttcaacatcggcaatatcggaggcgccggtctcggcatgcaggttttattcggcatttcgccgcagatgggagccatcatcagcgccgtcatcgcgattttgatctttgtcattaaagaagcgggaaaagcgatggaccggtttacgctgatcgcaggctttgtcatgattttactgacggtgtacgtcgctgtcaccaccggacctccggtaggggaagcgataacgaagacggtcatgcctgataacattgattatcttgcgattataacgcttgtcggcggtacggtcggcggatacattacatttgccggcggacaccgattgcttgatgcgggtgttaaagggaaggatgcgatccctgaagtaacgaaaagctctgtttccggcattttgatcacgtctgtcatgaggattgcgcttttccttgccgtacttggcgtcgtatcaaaaggtatgcagattaatccggataatccgccggcatcagtattccagcatgccgcaggaaatgtcggatacaaaatcttcggcctcgtcatgtggagcgctgctattacatccgtgatcggtgctgcttatacgtcggtatcattctttaaaacgttttctccgaaaatcgaaaagaattcacgcggcattataattgtctttattattgtatcaacgctttgctttgtaacaattggaaagccggtcaaccttctcgttcttgccggcgcattaaacggcttaatcttgccgatcgcactaggctcccttttaatcggcgcgcataagaagaatgtcatcggcgactacaggcatccgatctggcttacaattccgggcattctggtcgttattgtcatggccatcatgggaggctatacgttaatcaatgaaattcctaagttatggggatgatctcgttgcatgtaaatgaaatgcgtcctgacgaagtcagggctctgattcgaaaaggggaaataacgggtccgacagccggcatggccgggggttttacccaggcaaacctggtgattttgaaaaaagagctcgcttttgagttcttgctgttttgccagcgcaatcaaaagccgtgtccgattcttgatgtcacggaccccggatctccggttccgtccatcacggcgccggacgctgatatccgcaccgattttccaaaataccgcgtatacaagcgtggcgaattggcggatgaagtgacagatatctcttctttatgggaagacgacatggtcggttttttaatcggctgcagctttacgttcgaacaagcgttaatgaataacggaatccctgtcagacacattgaagaaaagcgaaatgtcccgatgtatcaaacgaatattccttgtgtcccggcaggccgttttcaagggcctatggtcgtcagcatgaggccggttccggaagagcaggcggtgcgagccgttcaggttacatcaaggcttcccgccgttcacggagggcctgtccatatcggcagtccagaagccatcggtataacagacatcgcaaaacccgatttcggcgatgcggtaacgataaaaaaaggggaagttccggtattctgggcttgcggcgtcacccctcaggcagtcgcaatgcacgcaaggccggagctgatgattacgcattcgcccggccatatgctggttaccgatgttcgggatgaacaatttggtgtgttataggatttcaaaatcaatacagagcggtttatctgtattgatttttaatttaaggggatgaaaggcaaggtgaaacagaattgaaaaatctttcgaatgcgacaatgtctccgctcggcgactccgcggttatcatccagcttggagaggggataagcgaacagacgcaccgtgtcgtcagcgcgctgacaaagcggattgaaaacgatccgtttcccggttttattgagtgtgtgccggctttcacgagtgtgaccgttttctatcagccatttgaagtataccgcaagatggagagcggcaaggctgttgattctccgtatgaaaaggtaaaagccctcctcgaccatcatctccaagagctcacaatggaagaagagacagatcagcgcacggtggaaattccggtttgttacggcggccgtttcggccctgatttggaggaagtggccgacatcaacggcctgactgcacaggaagtcatcgatattcacacctcgggtgagtacctcgtttatatgatcggctttgcgccgggcttcccttacctaggcggaatgtctgaaaagatagccgcaccgcggcggtcatctcctcggacttcgattcccgccggttcagtcggaatagccggcatgcaaacaggcgtctatcccctttcaacgccgggcggctggcagctgatcggcaatacgccgcttgaattattcaagccttatgaacagcctccgagccttctgagagcaggggatatcgtgaaatttgtcagcgtgacagaagaggagtatcacgcgctgaaggaggggaaatcttgagcatagaagtgttaaagccgggtctgatgacaacggttcaagacttgggccgcacaggttttcaaaaatacggcgtgcttgtcagcggtgccatggatgccgattctttgcggattgccaatctgctcgcggggaacagccagaacgaagctgcgcttgaagtgacgctgatggggccggggccgtctctccgctttcaaaaacctgctcttatagcggtgacgggcgctgacttttcactgatggtaaatgacgaagaagtcccgctttggcgcccggttttcatcaaagagggcagcgtgttgacattcggcatgtgcaagcgcggaagccgtgcatatatggcagtggccgggggaattgatgtgccgcctgtaatggaaagcaaaagcacatatgtcagagcaggactcggcggctttcaaggaagggcgcttcaaaagggagacgtgttatcgctaggcagcccgacgccgttgtcggaagcgctgcacagaaagctcgcagacgagggcaaagaacggggctttgcggctccgaagtgggctgtcgaccgcaaatattttctcccgctaaaaaagaacccggtcattcgtgtcatcaaaggcgatcagtttgcttgctttacctcatcatcacaagagcgctttttcgcgggtccattccgggtgacggctaaatccgaccggatggggtaccgtcttcaaggagaggcgctcgaactcactcagcctctggaaatgatctctgaagcggtatcattcggaacgattcaagtgccgcccgacggcaatccgatcgttcttctcgcagacaggcagacagcgggcggatacccgagaatcgcccatatcgcatcagctgatttttctcaggtcacgcagatgatgccgggcgagcaggtgcagtttcagcttgtcagccttcaggaagcagagcgcgtttacatcgaacgggagacgaaaatcagcgaactttctgcccgattgaagcttgaatacatgttatgataggtgtgatgtgtatcaggagggggaaggcatggaacataaaaacaaaacagtcgtcaaagccatgaccctgctcaatctgttcctgacgagagaaaggctctcgctgggcgacatgattgagctgacaggcatgccgaaaacatctgtctaccgcatggtttgttctctcgaagaaatgggttttctcgaccgcgacgagaacgggatgtatagcttaggactgctgtttttgcaatacggccaccttgtttcagaaaggcttgatattcgaaaaatcgctctgcccatcatggaagaactccgcgatgacgtggatgaagccgtccatttaattgtaaggcagggaaatgaagcaatgtatatagaaaaaattgagggcacgcagaccgttcgcctctatacagcgatcgggaggcggtcccctttatatgccggagcctgtgcgagaagcattctgacgtttttgcctgaagaggagcgggatgcctatatcgagcaaacagagctggtgccgatcgcttccggcacgatccgggacaaggctgagctgatccgcattgtggacgagtcgtaccggagcggctgcacggtcagtcattcggagctcgaagactacacctccgcgattgccgcgccgattttcaatcataagcgcgaagtcgcagctgggatcagcatcgccgggtttgaagcccgctttcagaaagaccgtcttccttatttgaccgaaagagtgaaaaaggcggcgcttgacatctcgagaaaattaggtttttaggaaaaaagaaaagtatcctttcgagcctctgccgagtacatatatggtagctgccgcgaaaaaacggcatatcggagggggaaaggatatgacgcttcaatatacggctctcggcgactctttaaccgtcggggtcggtgcaggtttgtttgagccgggatttgtacagcgctataaaaggaaaatggaagaggatttgaacgaagaagtttctttgattgtatttgcgaaatccggtcttgagacgtcggaaattttagcgatgctgaacgagcctttcatcatggaacaggtcaaaaaagcggacgtcatcacgataacgggctgcggaaatgatcttctgcaatcgctggagatatatgaaaaagaaaaggatgaacacgtctttttggaagcttcctcccactgtcagaaaaactactcaggcatgcttgagaagatcagagaaataaagggagaaaaagatacgcgttatctcgtccggcttctcaatttatacaacccatttccgtcaatcgaattagcggacaaatggatttccggctttaacaggcacttaaagcagctagagtccgctccgcaaatcaaggtgatcgatacttatgctgtctttaaaggacgcgaaaaagaatatttgtcaattgaccgtgtgcatccaagcagcagagggtatgaagcgatgtcggaaaagctgagagcggcgggctacgggcggctggagggctgaatatgatgaagaaagaccattccaatcaggaatggtctttttttatgtaattcttcagcgagcagccgaaaacagactaaaaaatgaaactattaaattttgtcacacggctcctgccaaagtgccgttttctttcgattgagcagtcatctgtaagcgttttaatatagaaacagggagccgacattattcgacatcatttttttatcacaggctttaaaggacaacaaaggagggttatgaaatggaagatagacaaaatcaagatttcaaagtaaagattcaacgtttcggaagctatttgagcggaatgatcatgccgaatatcggtgcatttatcgcatgggggatcattaccgcattgtttattccgacgggatggatgccgaatgaagcgcttgcttcattggttgatccaatgatcaaatttttgctgccgctcttgattggatacacgggcggtaagatggtgtacgatcaccgcggaggcgtcgtcggtgcgactgcagcgatcggcgttatcgtcggcgcggacattccgatgttcctcggcgcgatgatcatggggccgctgggcggctacctgatgaaactgacggacaggcttttcaaagataaggtccgttccggatttgaaatgctgatcaacaactttacagccggaattctcggcttcattctggcggtgctcggctttcttgcaatcggtccggtggtgctcggcttaaacaaaacattggcggccggcgtggaagtgatcgtcaatgcgaatctgcttccgctcgcaagtatttttgtagagcctgcgaaagttcttttccttaacaatgcgatcaaccacggtattttgagcccgattggtattgagcaggccgcccagacaggaaaatcaattttattccttttagaggcgaacccaggccctggtctcgggattcttttagcttacatgattttcggaagaggcacatcaaagcagaccgctccgggcgctgcagtgatccatttcctaggcggtattcacgaaatttatttcccttacattctgatgaaaccgctgttaatcctggctgcaatagcgggcggagcgagcggtgtgctgacgttttccatctttaatgcggggcttgcggctgttccttcacctggaagtattattgcggtgctggcgatgacgccgaaaggcaaccacatcggcgtgatccttggtgttctcgtcgcagcagtcgtttcattcattgtagcttctttgattttgaaaacgtctaaagccggcgaagaagatttgacggccgcggcggaaaaaatgcagcaaatgaaaggcaagaagagccaggccgtttctgcattgacttcggctgacgaagcggaagaatcagcggctccgtacgaaaatgtcagcaagatcatcttcgcgtgtgatgccggaatgggctccagtgcgatgggggcatcaattttgaaaaacaaagtcaaaaaagcagaactcgatatcgacgtatccaatacatcgatcaataatctgccggaagatgccgatatcgtcatcacgcataaagacttaacggaacgcgcaaaagcgaagcttccaagcgccagacacatatcggtggaaaacttccttaacagtccaaaatacgacgaactgatcaatcagcttaaaaagtaaagtttgagaacccgtgagcctgaaaatcaggctcacacaacatgtatgaaagagagtgatttcccaatgaaaccagtacttgcaaaagaaaacattcatctcaatcaatctgccgcaacgcaggaagaagcgatcagactggccggaaaggcgctggttgacgccggctatgttaccgcggattatatcgagaaaatgttggagagggaaggcctcacttccacttacatggggaacgcaatcgccattccgcatggtacggaagacagcaagcaggatgttcttcattccggaatatccgttatccagcttccggaaggtgtcgaatacggcgatggcaatattgctaaagtgatctttggcattgccggaaaaaatgatgagcatttggagattttgtcaaagattgcgattgtctgctcagaagcggacaatgtcgaacggatcatcaatgcgaaaaatgaagacgagttaatggcggtttttgaagaaggtgaccaggtatgattgcactgcatttcggtgcggggaacatcggccgcggatttatcggagccttgctctgcaaatcggggtatgatgtcgtgttcgccgatgtaaatgatgccgtgatcaatgaactgaacgataagggccgctataccgtcgaaatggccgatgccggaaggaagcaggaaacgatcggaccggtccgggcgatcaacagtgcgacccagcttgacgaattgtatgatttgatagcgaaagccgaccttgtcaccacagcggtaggcccggcggtgcttaaattgatcgcagagccgattgcagaaggtttgaagcgtcggatgaaaataaacaagcagcctttaaatattatagcttgcgagaatatgatcgggggcagcgctcatcttcgcgaggaaattttcgcccgcttaactgaaacggagcgcgccgcaatcagcgattcagtcggctttccgaactcggcagtcgacagaatcgtgccgatccagcaccatgatgatccgttgaaagtaacggtggagccttttttcgaatgggccgttgatcaaacggaattcgccggaaaagtgccggatattgaaggtgtgacatatgtagcggatcttgcgccattcatcgaaagaaagctgtttacggtcaataccggacacgccatggcggcgtatgccggctataagaaaggtttgaagacgataaaagacgccattcatcatctggaggtccgccaaacggtggcaggcgcgctagaagaaacaggccggtaccttgtccaaacatacgattttacacaggaagagcaccgggcatatatgacaaaaattatcggccgctttgagaatgaatgcctgtcagacgatgtcacccgtgtggccaggtcgccgcttcgcaagcttggcagggatgaccgtcttgtcggcccggcccggaagctttgcgatctcggctttgaacctgtccgccttgcagaaggcattgccctggcgctgcagtttgattgtgccgatgatccggaagccgttcagcttcaaagcatgatcgctgaaaaaggctatgccggcgtgcttcgcgacgtatgcggactcgaagaggatcattctttattcaaactggtaatcagccatttgaaagcatagctttagatagaatcgggagagggcggcagccgggcgggggctgccgaaaacagaatgtatgaacagggcggcgcagatgcaacctaatctagaaacatcagctgtgagctgatgtttcttcacttcttgaaaagtatttgcacagattttaataaaaaattaattagtttgaattgaagattttttgacagcgttttatgatagggataccgtttcaaccgccggaccccctttcacccccccgcaaaaacgacaacaccggaggtggcgttttatgtatatgacagcaagggaacaaaaactaatgaaataccttttgcatcaaaaccgttatgtcaaagtcaatgaaattgccggctatatagaagtcagcacaagaacggtccaccgcgagctcaaggcggttaaatccgttctggacaagtacaggcttcagcttgataagcagccgggaaaaggcttgaaactggtcggagcctacagagacaaacagcggcttcttgaagatctgtcccgggacagtcatgtcgaatacagtgccgatgaacgaaagcttttgattttatgcgcgatgcttgaacgggagagccgatcaagctttatacaattgcccatgacttgcaggtgacggcggcaacgatcagcaacgatcttgacgagctggagaagtggatcgctccattcggcctttcgctgatcagaaaaagaggctacggtatagagctgagggggccggaggacgccaagcggaaaatcgtcggaaacttgatggccgacaagctcgatgttcagcagtttctggaaacgatcgaaatgaatattaaaggcaagaacgaagcgccggagaaaatattcggtgtcgtcagccgggggaaattgctgaaagcggaaaaagtgctgtttcagatgaaagaaaagtatggactttctctttccgacagtgcatacatcgctctggtcgtccacttgacgtttgcgatcgagcggatacagctcggtgaaatgatcaatatgaatgaagaagaattgacggatctgaagcgtacgaaagagtttgaactggcgcttgcgcttgcaaaggcgcttgaagatgcgtttcacgtgaagatacccgaagctgaggcggggtatattacgatgcatttaagaagcgccaacaaaagcttcaaaatcgactacagagcggaagatatcgagctggatactgcgctcagaacgaaaaagctgatcgatttcatctcgcaaaaaacgggcatgaatttaaccggcaatcattcgctttatgaaggattaatcgcccaccttgaaccggcgatcatccggatcaaagaaaagatgtcggtgcataatccgttaacagagcaggtcaaaaaagattattttctcctatatatggccatagaggaaggcgtcgaaatatttttcccggaaatccggtttccagatgaagaaattgcttttatcgtccttcactttggatcggcgcttgagatgagcaaacaaaaagtagacatcaacgcgctcgtgatttgttcgagcggaatcggttcatcaaagatgctggcctcgcggttgaaaaaagagcttcctgaaatcgcttcctttgagatatcctctctgatggaactgaagacgaaaaacactgatgcctttgacatcatcgtttcaaccgtgccgatcccatatgaaaacattgactgcgtcaccgtcagtcccctccttgacacggaagatgtgaaacagatcaaacaccagctcacccgaaaaatcccgctcatccttcggaaaaagcggatggcgcccaaaaaaccggagccgtttccagatatgcttcagattgcgcggaaaatcggccattacgcggccggcattcaacatatactgagccattttacggttgaaacgatggaagctgaatcaagcctggaacatacggtcaaacggatttgcggaaccctggaagatcaaggcctggttaaggatgcagggcagatggcggatggactgatgaaaagagaagcacagggtggcctcggaattcccggaacaaccttcgcgctgtttcatttaaaaagtgaagcggccgcggttcccctctttaaagcttatgatctgtccaaaccgttcgagatcaaagggatggacggaagcgccatgaagatgatgcggatgctcatcatgctggcgccggccgatctgtctccggaaggttccgagattctgagcttcatcagctcttcgatgatagaaagtgatgagagcataaaagcataccagaccggagaccgcgagcagctgtacggcatgctgaacgtgctgtttcaccggtttatacaggataaagagtggtgagagccccgggttaacccggggctttcttcatttttatcgcacatggtcatgtttaaacaaaaatttctccggttaaaagtctagtaacatcagctaaagggaggaatcacaaatggatttgcgcaatcagcagacaaacgggcagccggcgcagacgcaagaccgccagcccggcatcgaaagcgtcatgaatccgcgtccgatctatgaggatgaaaattacaaaggaacggataaactgaaaggaaaggtcgcgctgatcacaggaggcgacagcggaatcggcagagctgttgccgttgcctatgctaaagaaggcgcggacatctcgatcgtctacttgaatgaacacgaagacgctcaggagacgaaagcgcgcgttgaaaaagagggcgtcaaatgcctgctgcttcccggcgatgtcagggatgaagctttctgcaatgacgcggttgagcagacggtgaaggagctgggccgtcttgatattcttgtcaataatgcggccgaacagcatcctaaagacagcattaaagagatttccagtgaacagctcgagaaaacatttaaaacaaatttcttctcttatttctactttacaaaaaaagcgattgattatctggagccgggcagcgcgatcatcaatacaacatcgatcaacccttaccggggcaatccgcagctgattgactacacggcaacaaaaggggcgatcaatgcgtttacacggtcgatgtcacaggcgctcgtcaaagacggcatccgtgtcaatgccgttgcaccgggaccgatttggacgccgctgatcccgtcaacgttttcaggggaggaagtggcgaagttcggtacagatacaccgatgggccgtccaggtcagccggtcgaccatgtgggctgctatgtgcttttagcatctgacgattcttcgtatatgacagggcagaccctccacgtcaacggcggagactttatcacgacataaaagggggaagctcgtgtgaaggtgacaaaggaagatgtaattgaatactacgagaaagcgggcattgtgctgaacgacgatgataaagaaaacatccaaatcatggactacggattaaataagctggataagctggggcttcagctgttcgtctatgtcaacacagaccgctactgcgccaaagagctcgtattattccctgaacaaacatgccccgaacaccggcatcctcctgtagacaagcagaaagggaaggaagagacattcaggtgcagatacggaaaagtgtatttgtatgtagaaggagaaaaaacggaagccccggccgttatgccgccggacgaggatattgaacatttcaccgtttggcacgaaattcagctcacgcccggcgaacagtttacgattccgccggacacgaagcattggttcaaagcggggagtgaaggtgcggtggtcacggagtttcttcaacaagcaccgatgatcacgatgtgttcacagatccgagaatttagcgaatgggagtccatctcattcgctttttttcgctcgctccatcacatcaaagccgatgaagtgccgtccgtcatgatcggcaaaataaaattgaacaccgttcacacaaagtgttttgaccgcttcctgtgccgtcggtcgaaaccgccgaacgtgcgtcccgtttaggtaagccggttcaagtttatattttctgccggtcagcgttccaagccgcgcgatttccggagcctcgtcccccggaaattcgacaccgatgatccgctgatggcggtcaaagtctgcagacaaagccgtgtcgccgatatcatctgttgctgataccgatccggcacgcctttccgttaaagcaatgtagcccatatcagcctcggcatcaaacgatatgaaaatattcacgtcaaaaacctccattcaattgtttaatatacaagacattgtggaaaagtaacagtggagacgatacaaaggagggaacctcaaaatggaacagcagcaattgaagaacaaggtgcttgatattctcgatcatcataaaatcggttcgcttgcaacggttgaaagcggcaagcctcattcccgctacatgacctttttccatgacgggctgacgctttatacaccgacaagcgatgagacgcacaaggcggaagagattgataacaatccgaacgtccacgtgctgttgggttataacggcgaaggattaggcgatgcataccttgaaattacaggtacggcaaagctcaaccattcaaaggatttaaaggacaaaatttgggatgaaaggcttgagcaatggtttgacggaaaggacgatccgaacttgaccgtgcttgagattgagccttcggaaatcagactgatgaatgaaggcgaaagcaccccggtcacgcttgacatgtagcactgtgctcaatcagtttgtcataaagggcgaactgtagtataataaaaaacaggaacacgcaaaagagcaaataaatggaaagtaaacttcttttttctttcttagaagatgctaatttcttcctctgacccgcccctaacaggatagagggaaaaaagactttttgtttcacaattcacactggcgcggcttcggagccgcaaggacgaatgagaggtagggctttcgttgtcttgtatcagaaattccatggtgtttactttcgctcggaacgatagatgctgatcttttacgaaattcaaatgaccgcctttggcagcggataataatttatttgctcgaataaatatgataattgagaccgcttcggcttttgccggagcggtttttgatttgccgaaacgtttccgttttaaaaacagtcttacctatagactggaggaaggtaaatggactttttaacatccaaggtgctattgattttttgttttctgttgttgatccattccatcgaaacgctcgcttacgctgcccggctgtcaggcgcgagagtcggatttatcgcatcggctctgtcattatttaatgtgatggtcatcgtctcgagaatgtcaaacatggttcagcagcctgtgacgggaaagcttgttgatgtcgcgggggcggatgcgctttccctcgtcggcagccaatttcggtttttgatctttggttcaaccgtcggcacaattttcggaatgctgcttctgtcgacattcgtcgccgtattttcgagagcgattgttcatttggcaggagaaaatggctccgttttgcaagtgtttcgcaaggcgttttcaaaaaatagcttcaagcatgcaaagcattatgcaaaaagaccgagcctggaatatgtgaaagactttcggttccgctatataccgaaacggctgtttgtcttgaacatggtcattacggcgatttatacaatcggcgttcttgccgctctttatgcgggcgtccttgtgcccgaaaggcatacgaccgcggtgatggcctccggccttgtcaacggggttgcgacgatgctgctcgcgctgtttgtcgatccaaaggtgtcggtacttgcagatgacgtagcaaaagggaagcggagctatacgtatttgaaatgggcttcgatcacaatggcagcatcgagggtggccgggacgatttttgcccaagtactatttattcccgcttcttactatatcgcatggatgacgaagtggatgtagtcgatttttgacgaaaagatcaaaattcgatcattttcattacattatgaaacaaatgaaaacaaaatattatctttttcgacagggttagacagcttgatctttcttttattaattgcccgctgtttcatcctgtgatagtcttatgtgtggcggtgataaaagtggagagggttagagtaagagtaagaaaaccgaaaagaaaaaggcgaaaaatcataaagcgcctgtttacattaactttgctggttatcatagcagcagcgggttatacctactttgaatacaaaaaaggcttatctgaatctgacggagattttaaagaagacggacagtttgaatttaacggggaaggctctgatcttgatgaagtgaacatcctcgttcttgggatcgattcaagaggggaagaccattcaaggtctgactccatgatggtcatccactataataaaaagcagaaacagcctaaattgatttcgattatgagggacagctatgtcgacattccgggatatgacaagcaaaaagtcaatgcggcttatgcatacggaggcccggaactcgtcagaaaaacattaaaagaatcctttgatttggacattaactattacgctgtcatcgattttaaaggttttgccaaaatcgttgatgcggtggcgcctgacggcatcgaagtcgatgttccgaaaaaaatgtcatacggaatcggcatgacactgcagccgggaaaacaagttcttcacggtgaaaggctgctgggctatgtccggttcaggcatgacagagaaagcgattttggacgggtcagaaggcagcaggaagtcttttcaaagcttcaaaaagaagcggtgagcatcggaaatatcgcacagcttccgaagctgtgggggctcgtcgatccgtatattgaaacaaacattccgaacggcgtcatactctccgtcggcaaagactttttgcttggaagcgtaaaagaaaccaaaagcttcaggctgccggttgacggatcatttacgaacaaagacgatccaaaatacggggcagtccttgatttagaccttgaacaaaacaaggaagagctgaaacgctttttaaatgagtgatcaaaaaatccgccgggaaacccggcggattttactgatcatatttttttagtccccggtcataaaggaaattgccgaatggaacaaatgcggccacaagaccggcagccggccatttcacagaccacctcagcacaaaagttgcatacaacagaacaaacaaatacaaaataaacaatccgccgtgaaccgatccgacaatcgtaacggccatcgggtaatccgcccaatatttaagcggcatggcgatgaacagcaggattaaaagcgacatgccttcaataaaacccatcaaccgaaggcggccaatcggcgtttgcagcatagtatacctcctgtggagtgatagtctacctttatactataaaccaaaaggggacaaatatgacaggtttttctccgattgatttatgcgtctgccggaagcttcattaaagcgccgaagtattgctgggcagtcgtaaaacaaataaatgcggtcaattccgttatttcttcttctgaaaacacttcttttaaaacatcaaactgcctgtctgacacgcgctccctctgcgccaaaaagacctctgcaaaccccatcgcaaagctcgttttctgctgattcggaatctcgggcttccccttggccttgcaatattcacacccgtttccctgagccagcacacggcgcacctgctccttcagttcctttgataaaaagccatctcctgacagctcctcagctaaagccgtccagcttgacatcaggctttcagagtgtccgagcagccgctgaaacggcgtctctcctctgtctgaaaaattgattcttgtcatatgatgatcacctcttcataatcatatataagcagaagagaaatatgaatttcgaacgaaagaattttcgtgaaaatattaaaataatgaaatagaatggagggaataaagttacatatgaaaattgatgatctcgattttaaaatcatagccgaattaaagaaagacagccgtttatcgatgcgggagctgggcaggaagatcagcctttcggcaccgtctgtgaccgaaagagtcaggcggctcgaatcgttcggcgtcataaaaaaatatacgctggacatcgattaccaaaaggtcggtcttcccgtttcctgcatcattgaagcaacggtgaaaaacggggaatacgagaggtttaaagcgtatatcgaacgcctcccgaacattgaattctgctaccggatcgcgggagctgcctgctatatgctgaaaatcaatgcagagagcctggcgaagatcgaagcgtttatcaatgaaacgtctccatatgcccaaaccgtgacacacgtgattttttcggaaattgaaacaaaggaatcgtgaacattagagatgcatctgtatcatctgttataatataaggatgcatgaacaagaaagtgatgtgatgatggacgtgtctaaaacagttgttttagcagaaaaaccttcagtcggccgtgacttggcccgcgtgctgaagtgtcataaaaaaggaaacggatatcttgaaggcgaccgctatatcgtgacatgggcgctcggccatctggtcacattggcggaccctgaaggatacggaaaggaataccagtcttggcggcttgaagacctgccgatcatccctgagcctttaaagctcgtcgtgatcaaaaagaccggaaaacagtttcaggcggtaaaatcgcagctgatcagaaaagatgtcaaagacatcgtcattgcaaccgatgccggccgggaaggcgagctcgtcgcccgctggatcatcgaaaaagcaaaggtcacgaagccattgaagcgtctgtggatttcatctgttactgacaaagcgatcaaagacggatttaaaaacttaaagaacggcaaagactttgaaaacctttaccattcagctgtggctcgagctgaagccgattggatcgtcggcatcaacgcgacgagggcgctgacaacgaaattcaacgcccagctttcctgcgggcgcgtacagacgccgacgctggcaatgatcgccaaaagagaggaagatattaagaactttaaacccgtcccttatttcggcttgcgcgcagcggtcgacggcatgacgctgacatggcaggacaaaaagacgtcacagacacgcacgttcaacgcatctgtgacgtcgcagcttgcaggagcgctgcaaggcaaaccggccgtcatcgtcgacttgaaaaaaacggacgaaaaaagctttgctcccggactttatgatctgactgagctgcagagggacgcccataaacgcttcggcttttccgcaaaagaaacgctgtccgttttgcagaagctctatgagcagcacaagctcgtcacctatccgcggacggactcaaggtttctttccaatgacatcgtcccgacgctgaaagaccgtttggaaggcatgcaggtgaagccttatgcccagcatgtggcccggatcctgaagcggggggttaaagccaataaaagctttgtcaacgatgcgaaagtatccgatcaccacgcgattattccgacggaagagccgcttgcgctcggcgcgttaagcgaaaaggaaagaaagctttacgatttgatcgcgaagcgcttcctcgctgttttaatgccgccgtttgaatatgaagaaacaaaagtgtttgccgaaatcggcggagaaacctttacggcaaaagggaaaacagttcagtcgcaaggctggaaagcggtgtacgatttcgcagacgaagatgatgacgaggaagaaaaggatcaaacccttccaaaactcgcaaaaggcgacacgctttccgtccggtctttgacagagacgaagggtgaaacaaaaccgccggcgcggtttaatgaaggaacattgctgtctgcgatggagaatccagccgcatttatgcagggagaagaaaaaaaccttgtgaaaaccctcggagagacgggcggacttgggacggtcgcgacacgcgccgatattatcgaaaagctgttcaacacgttcctgattgagaaaaaaggaaaagatatttacattacttcaaaaggaaaacagctccttgagcttgttccgtcagatttaaaatctccggccctcaccgccgaatgggagcagaagctgtcaggcattgcgaaaggaaagctgaaatcttcagccttcattaaagaaatgaaggagtacgcaaagcagacgatcagagaaatcaaaagcagcaatcaaaagtttaagcacgacaatatcacaggaacacattgccctgactgcggaaaactgatgctgaaagtaaacggcaaacgcggcacaatgctcgtctgccaggacagggagtgcggccatcggaaaacggtcgccaaacagacgaacgcccgctgcccggtttgccataagcgcatggagctgcgcggccacggggaaggccaaacctttgcctgtgtctgcggccaccgcgaaaagctctccgttttcgaaaagcgcagagccaaagacaaaaattcaaaagcgtcaaaacgcgatgtacactcttacatgaaaaagcaaaacaaggatgagccgatcaacaatgcgctcgccgaacagctgaagaagctgaagcttgatcaataaaacgggaagcctgccggggacggcaggctgttttaatttgtccaaatatcacaaaaacctgctgttatgacgcgatgatagaaggagattcactgcgcggaaaaaaccgggaaattcatgtagccgcgcccaggaaaatcggattgaaacatgaggatattctggatgctgatcaatgttgaaatccttgtcagccgctcttgtataaagaccgactccgcctttggaaaatcgtcccgcacttttgtggcaggggaattttagcgaagttgagcacagccggaaaacgaagcatgatatctcgattttctcttttgctctgccgggtttaagaaaagaattgatgtacaatcaataggtcagaaagcctgtctaccgccggttttttttatattaaaaaagtatttacaatgctcgtaaacgggagtatgatctctctataataatccaaaatcgcttaatctaaaaaagagcgggggaaccatttagaggcgtacagcctccggggtgaatccttttaaaggtagggcaaactctcgtgagcccgaatccgtcagctaacctcgtaagcgttaagagagagggagataacctgggaataaaaatccgattccgcaggggcttttgcctctgcgcttttttgtgcgaaaaaatactgaaaaaacagcaaagaaggagaagacaatgatgtatagtgcaataaagcggtttttaatcgggaagccattgaaatcaaaagagcttagagaacaaaagattacaaaaacaaaagcattggctttgctttcctctgacgccctgtcttccgtcgcttacggaacagagcagattctgatcgttttggcggctgtcagttccgccgcattatggtattctctgccgattgccgcaggcgtcatgattttattgacggcattaattctttcataccggcagatcattttttcttatccgcacggaggaggagcttatgttgtatcaagggaaaaccttggagtgaacccggggctggtcgcaggagggtctcttcttgtcgattatattttgacagtagccgtcagcgtttccgcgggaaccgacgccattacatcggcagttcctatgttgcatccgtatcatcttctgatagcgattgtgctggtgcttttgattatggttttaaatttacgagggctgacagaatcggcttcaatattggcataccctgtgtatttatttgtggccgctctcttgattctgatcgcggcaggcagctacaaactgcttaccgggcaaatcgagccggcggagcatgctgcagtcggcacgcctgttgccgggctgtccctgtttctcctgcttaaagctttttcttcaggctgttcggcattaaccggcgtagaggcgatttccaatgcgatacctgcttttaaagatcccgcgccaaaaaatgccgcaaatacccttgcgatgatggggatattgctggctgtcctgttttcggggattacaatgcttgctttcggttacggcatcacgccgaaaagcgaagagacggttgtttcgcagattgcatcggaaacattcgggcggtctttcctttactttttcattcagggcacgacttcaatgattttagtgctggcggcaaataccgggttctcggccttcccgcagcttgcgtttaatttggcccgggataaatatatgccgagaatgtttacggtcagaggagaccgcttagggtattcaaacgggatcatctttctcggtattgcatcgattgtgctgattgtgctgtttaacggacagacggagcatctcattcctttatatgcggtcggcgtgtttataccgtttaccctttcgcagacggggatgtgcttgaaatggatgagggaaaagccggacggctggattgcaaaaatgatcattaatgcagcaggagccgccatctccgctgtcgtgctgctgattttattcattacaaagtttgcgcttgtttggccgattgtcatcttcatgccgattgtcatttgggccttttatgcggtgaaaaagcactatacagcggtgagcgagcagctgagaataacaggcaagcctttggagccgatcaaaggaaatatcgtcattgtacctgtcgcgggtgtgacaagcgtcgtcgaaaagtcggtccaatacgccaaaaccttgtcagatcaagtgattgcggttcatgtatcatttgacaaagaagaagagaaaaagattgagaagaaatgggaggctcttcaaaacggggtcaggcttgtaacgctttattcctcataccgaagcttgatccacccattggaaaagtttctggaaacagttgaagccaaagcggcgagctacaactactctgtgatggttctcgtaccccagttcattccgaaaaaaagctggcacaacattcttcacaatcagtccgcgcttttgctgcggctgaggctcctgtggaaaaaagacatagttgttgccacgcttccataccattttaaaaagtaaaaaacctgcagagccatgtctctgcaggctgtttttttggcgggtacgctgcaaaacgtttcagcagaaatggaaggaggtatggaaaaaacaaaggaggacgtgatatggcaaacaaaaccgcaggaaaaatagctgcagaactgctgaaggaatggaacattgatcatgtttacggcatgccgggcgacagcgtcaacgaatttatcgatgaattgcggcatgaagaaaacagcctccgcttcattcaagtgcgtcatgaagaaaccgctgctctcgctgccgcagccgatgcaaagctgacaggcaaaatcggcgtctgcctttcgatagcgggcccgggcgccgttcatctgctgaacggcttgtatgatgcgaaagctgacggggcgcctgtgcttgcgattacaggacaggtgtcttcggatgaaatcgggagagattattttcaggagatcggtcttgaacgaatgtttgaggatgtggctctctttaatcagcaggtgcattcggctgaagccctgccagatcttttgaatcaggcgatccgtaccgcatacagccaaaaaggggtcgccgttctgagcgtatccgatgatctgtttgcagaaaagattaagcggaagccggtttatacgtctgcgctttatatcgaaggcgatcttgaaccgaagaaaagccagctgatgcagtgtgcacaattgattaaccaggcaaaaaaaccggtgattttagcgggacggggaatgaaatcggcgagagacgagctgctcgagtttgcagataaagcggccgctccgatcattgtcacactcccagcgaaaggggtcgtacctgataggcacccgcatatgctcgggaacctcggacacatcggcacaaagcccgcatatgaagcgatggaggaaagcgatctgttgatcatgctagggacctcatttccgtaccgcgattatctgccggaagatgccccggctattcagcttgacaacaatccggcgaaaatcggcaaacggtatcctgtcaccgccggccttgtctgcgatgcgaaaaaagggctttttgaactgacgaaaaccattgaacggaaatcgaaccgcgcatttttggaaagctgtatacaacatatgaggaagtggcgttatgaagttgaaaaagacgaacaggtagcgacagcgccgctgaagcctcagcaggtgattgcaagacttgaggacgcggtcgcagataatgcggttctgtccgttgacgtcggaaatgtgacggtttggacggcgcgccattttaatatgaccaatcaggattttttgatatcaagctggcttggcacgatgggatgcggtcttccaggcgcgatttctgcaaagctttaccatccggaacgccaggttgtagccgtgtgcggggacggcggtttcagcatgtctatgcacgattttccgactgctgtcaaatacgaactgcccattgttgttgtgattttaaataatcagaacttgggaatgattcaatatgaacagcaggaaaaagggcatgttaattatgcgacggcgctcgaaaacgtcgattatgccaagtttgccgaagcctgcggcgggaagggcttcagcgtgacaaagcacgaagagcttattcctgctttgaaaagcgcctttcattcacaaaagccgtcgattatcgatgtggcaattgaagacgaaccgcctcttccgggaaaaatatcctatacacaagctgtaaactacagcaaatatatgatcaaaaaactagttgagaaaaaagagctcgacttgccgccgctgaaaaaaagtttaaaaaggattttttagtatgatgccaagggagatcgtcccttggctttataacggtcagatgttaaaattgaatgggtaatattggaatggccgcgtatgttttctttttgcatcaaaacccgtctcaacactgtgaaaagagaggggattgtaacgtgtatcgtttgccaaaaaccaccttcagcaccgttttcatattagcagccggattgctgtggatgtccatcgttcctcagcaggccttcgctcatggttttatcgaaaaaccggggagcagagcggctctgtgcagtgaggctttcggatttctcaatctgaattgtggaagcgtgatgtatgagccgcaaagcctggaagcgaaaaaagggtttccgcatagcggcccggcagatggacaaattgcatccgcaggcgggctgttcggcggaattcttgatcagcagtcggaaaatcgctggtttaaacatatcatgaccggcggagaacacacctttacctggacatataccgccccccacaatacgagccaatggcactactatatcaccaaaaaaggctgggatcctgacaaaccgcttaagcgcgcagactttgaactgattggcgccgttccgcatgacggttcccctgcatctcgcaatttatctcaccacatttatattcctgaagaccgcctcgggtatcatgtcatacttgccgtttgggatgtggctgatactgaaaacgctttctatcaagtgattgatgttgatctagtgaacaaataaagcctggacttttcttgatctgtttggaaaaccgatttgtgaatcagcgggttttggtgcaaacagagaaaataagcgatcaaaaaccccggctctccaaaacatgccggggtttttgagattcgttatttctttttcttcattgcggcagccataaacggcagcagggtgccgaacagcatcgtaccgccgaagaaattcccgaggtaaggctgtccgatcaagtagcagacggcaaatacagccgcagcaagaacgatcatgatgtagcctggataaaacctttttttaaaacttgtccgctgggtaacccggaaaaatatcagcccgatgacgagcgggacaatccatagataaaacagtataaatactttcatgttcaaaactccatattttttaatctatcataccagattgcggcgtaaaatgcgtgtgacaaatcccggactcatttgctgcgggcctcatattcctctttcagaagcccgtatacgaaatggtcggagaagtggtcgtggagccactcgcattgtctgaggcagccttctttcgtgaagccgagcctttccggaatggcctggctttttacgttttgaacagcggccctgatttcaatccggtttaaatcgtattcgctgaaaagcgtatcgatcagcgcccggcaggcatccgtcatcattccttttccttgaaaaggctccccgagccaatagccgatcgaagtcgtgcggttgatccagttaatgtaatggagtccgatgattccggcaaattggccttgatgccatattcccgcttgaaacccgttgtttgcagcggcctgtttcatgctttcttcgataaaagcttcggtatcttccagctgctttgtgccgtccacccaaaacagccatttccgcaacacatctttagactgttggatctgcatataaacggccctggcatcttttggttcgagcatttttaaatacagatcatcacgtaccattaatttaaacatccagaatccccctttttctcagtataatataaaaaagccgaccgaggccgacttttaaccagaaaatgtatcgtaaatcaggaaaatattgagggcgacgattaaggcagcgatcagccatgagacggctgttatccactttgcatttttcaggctccccataatgcgtttattgctcgtaaataagataagcgggataagggcaaaggcgatgccgaatgacaggacgacctggctcaagacaagagcggttgtcggattcacccctgaagcaataatagcgatcggcggcaaaatcgtaatgaaccgtcttaaataaagcggaatcctgaaattaatgaagccctgcatgataatatctcctgaaagcgttccgacagacgaacttgataaaccggctgttaacaggccgacgccgaacaatacggcggaaagcggactgaccatgctgctgaagtggctgaaggccacatcaaggtcttcgacgaaaatgccgttcttataaaacagtgcagcggctacgatcagcatgctcgcattgattgctccggcaatcagcatggcgatcaaaatgtcgatgaactcaaagcggaatatctttttcttttccgcttccgtttttccgaccactcttcgctgtgtgagagcggaatgaagatagatggcatgcggcatcaccgtcgctcccaagattcccgccgccagcaggatgctgtcagcaccatcgaagcgggggacaaacatgccctccaaaaccgatccgatatcaggttttgcaaaaaacgtttgaaaggcaaatgcgatcacgacgatgaaaagcattcctgttatcgccgcttcaagcggtctgacgccgcgcctttgcagttccaaaatggcgaaagatccggcggcagcaataatcgatgcttcaagcatcggtatgccgaacagcaagtagagcccgagagcagctccgataaattcggccaagtccgtcgcgatcacgacaagctctccctgaatccacaagccgatggagaccggtttggggaattcttcccgggcgacttcgggcaggtttttacccgttgcaattcccagtttggctgacaatgactgaatcagcaaagccataatatttgaaaaaaggattacccataaaagcaagtagccgtatttcgaaccagccgcgatatttgtggcgaaattgcctggatcaatataggctatagccgcgataaacgccggacccaaaaaagggagcagccttttgaagcctttgctttttccatccagtgcatcttgggcttcttttgatatttgcgagtgtttggacaaatcgtgactgaccattttattcacctatattctcagttgtttttccttgtacataaaagtttccttagtgcaaatttatatcatcatcatatgcccgcaatgatcaattgtcaaccataagatgctatagtatatgcgagaatggtttcggccaaacaaaaaaaccagcaccgctttcgggcgatgctggctggaagttatgcttgagaacccattcttccgcggaagatcaggtttaaaatgaagacgagaattgcggctccgataatcgccggaaagatggcgaatcccgcaatatcaggcccccacgtaccaaacagcccgtggccgatccaagctccgataaagccgatgaccatggagccgataattcctcccggtgcaccgtggcctccgattgcacctccgattaatccgatgacaatggctacgattaaagaaacgagaaatcctaacattgtctttccaccctctttcaattgatttatattaaatgtttagcccgtctcgggcgtctataaacgcttgaaagcatattgagaaagacggatggctattcctcgagaagcgaagcgcctgcgatgcccggatgcgtcatttcataaggatccagaatgagatccaattcttcctctgttaaaacatcatggagcaaacacagctcgcgcactgatcgtcctgtggcgatcgcttctttcgcaattcgtgcggcggcttcatagccaaggtgcggattgacagccgtaatggtccctacgcttttttcaacgaattccttcagcctgatctcattcgcttcaatcccggtgatgcagtaatcggtaaatacgcgaaatccgttgttcatgattttaatcgactgcagcaaattaaagacaagcacgggctccatcacgtttaactcaagctgacccgcctctgatgcaaggcagatggtattatcgttgccgatcacctgaaatgcgatctggttcatcagctcaggcatcaccggatttactttgccgggcatgatggaggagccgggctggcggggcggcagccggatctcggctagacctgccctcgggccagacgccattaaacgtaaatcgttggcgatcttggacatgttcatcatgccgactttcaaagcagccgatacttctgtgtaggcatccgtgttttgtgtggcatcgacaagatggtctgcgccggtcagctgatagccgctaatatctgagaggtgcgcgacaacgttttgaatatatctcggatcggcgttcaaacctgtgccgacggccgtggcccccatattgacttcatagagatgatgctgcgactgcctgatccgctgaatatcgcgttcgatcacccgggagtaggcttcgaattcctggccgagcctgatcgggacggcatcctgaagatgggtgcggcccattttaatgactgaatcgaattccgccgcttttttgcggaaggcatccagcatatgctccatcgtcgataagagccgttttaagtgattcaatgtggccagatgaatggctgtcggaaacacatcattcgttgattgggccatattgacatgtgtgttcggacttaaatggaagtaatcccctttttctttccctaaaagttctaaacctctgtttgcgataacttcattcgtattcatattcattgaagtgccggcgccgccttgaatgggatcgacaataaaatgctcgtgccagagcccttccgctatttcgccggcagcttttacgatgacttcgccaagctctttatataaacgtttaatatccatgttggcgagagccgccgcttttttgaccattgccaaagctttaatcagctcttcatcaatctgatagcctgtaatcggaaagttctccacggctctcatggtttgtacgccgtaataggcgtcaacgggaacttctttttcacctagaaaatccttctcgatcctggttgctttcgtatccatggcaaaacctccgtaggttgtttcttatgatgtattgtgcctcgatccgccatgttttaatttgcttttaaaaaaaggaaaatcgtcttccgacatggggctgtcaagtaataaaaagcctgttttatctaatgacatacgctcatttgcatgccaaaaaaatttaaaggaaagatatgaagaaacagacaaatggtcaaataattatgtttatttattattaacttaattaaatttctttacttcatttatctatttgtagtaaatttccttatataaaattttcgtatgagaaaggaagatctatgatgggacatgtactgatgattaatttcccgggggaagggcacatcaatccttctatcggcgtcacaaaggagctgcaaaggcgaggggaaagcatcgtatattatgcagttgaggaatacgctgaaaaaattaaaaaaacaggcgcagaagtccgtttatacccggatttcagagaggttctatcacccgggaagaaaaaagaaaagatggactttgccgaagtggtttacaatatgtcaagtaaagtcaatgagatcgttcagttcatctaccgggaagtcaagagtgaatcttatgattatgtgatatatgaccatcacttcttagcggggaaaattattgctgaaatgcttgagctgccgagcgtttcgttatgcacgacatttgcaatggacgagcagtttgcaaaaacgtttaccccgcaaggcgaccttgaaagctcgccttattttgaaaaattgaaaggatccctcggcgaattaagtgagcggtatcctgtcagtctcgacaagccgtttgacgtattctcctgtccgggggatatcacgattgtctttacttccagagcgtttcagcctcatgccgaacgatttggaagtgactatttgtttgtagggccgtcgattgcgagcaggcaggatccgggaagcttcccgttcgccgagctggagggggaaaccgtcatcgtgatctcgatgggcacgatctttaatcagcaaaaagagctgtatcatatgtgtatcgaagcgctgaaagactttgacggcaaggtggtcatgtctgtcgggaaatcaacggatcctagggatctcggcagcataccggatcattttatcgtgaggccgtatatcccgcaattggaggttttgaaacaagctgatgtatttgtcacacacggcggtatgaacagtacaaatgaaggcctttactttgatacaccgctcatcgtcatcccgatgggggcagaccagtttttcgtcgctgatcaggtggaacgtacaggcgccgggatcaagctggacaaaaatgaactttccccggctgttttacaaaaaacgattaaagatatgcttgaaaaccgctcctataaagacgacgccgccaaaatcggccgctcgctccgcaatgccggcggctatcaaaaagcagcggatgccgtattggagttggcggggagaaagtaagacgctccaaaaacggagcgtctcgctagttcatcctgatcttccgctcaacactgccgtcttttttatggacgacgacggcggttcctttattttcggcgatttctttcgcccgttcgacggcttctgcttttgtatcctttacttcgctggcccgcttagcgtcttcggctttgactgcccagcctttttcatgtttgatgacatgctcgcacttttccgcaagctccggcctgctgctcgaaccgctgtcaccacgttttgtttcatcggctttttctgcataggatttaagctcgcttttgcttctgttatccgcccattccttcgcctgactcgtcgcaatcggaattgcccggctttcgtcgtatccttcgtcaaccatcgcattcgcaatttcaatagctttctttttcaccggtttgtccaaatgtttcaatgaagcaggatagtcttccattgaccatggcatttggccattcctcctttttcataaagttttacccgctggatgccgatcaaaaaacacggattcatcagatgaatcattgtatactataaaaaaacacaaatgagagggcgaaccttccgtgcgctacgacaaaacagatttggaaaacgaactgaaaaaaattgaaaaatgggaaaaggaacagcagaaagcatggttttgggaaaggatcggccggctgccgttcaaagttctggacaagcttacgccggcattcattcaagataaaatcggcctgctgctagacgaaatcggcggctttattcaaaatggaggccaatatttgacgtccgaaaagcatctgatccgccagtttcaaaaaaagctgccggatgaaacgatcgaaacgattgaagatattcaatgggctcctttggaagtgatggatcaaatatgtgaaaatctcgggaaaaacagggcgaataccgcagcagtccaaggagcgacaaccggtgtgggcggcttgttcacgcttgccgtcgatattcccgcaatcctcggcctttctttaaagacattgcaggacatcgcggtatcttacggctacgatcctaaagaaaaaacggagcggatgtttattattaaatgtctgcagctcagcgctgctgatattgtcgggaaaagggcgatcattcaggaactcagccgataccatcaaccatcaggctcccgtgaaaatatgatttcgcaaattcaaggctggcgggaagttgtttatacataccgcgattctttcggatggaaaaagctgtttcaaatggtgccagtagcaggaatcctttttggtgcaatctcaaatcgttcgatggtgaacggtgttgccgaaacagggatgatgatgtataaaaagcggcgcatcatggaaaggcttgcggagctggacgcgacagaaacagagggataaaaaggctgccgtttgataacggcagcctttcttatagagttacgctttttctgtaaagcgaggcagtctgaagataatcgcgcaaatgccgcagacgccgattaaaatcggataaaaagaataaggaaggatgctgataggcgatattttcgcgatttgtgcagctgacagcatttgtgcaccgtaaggaatcaatccttgaaccgcacaggaaaaaatatcaaggatgctcgccgatttcctgttgtcgattccgtacctgtcagataaatcttttgccagcggccccgctgtaatgatggcaatcgtattgttggccgtcgccaggtttgccgcgctgacaaggccggcaatgcccgcttcagctcctttttttgaacggattctccgcgatacaaattgaaggagaaacgcgatcccgccgtttcgcttcatcatttccgccattccgccaatcagaagcgataaaatgatcagttcagacatcccgccgatgccttcggttatcgccgtcaaatacgtatgaagcgtcaggcttccgtcggaaattccgattaccccggctaatacgatgccgccgaaaataacggccataacattaaatccgagaagggcaaatatcagaaccccgagatacggcagcaccttcacccagctgtaagtcccggcttgtgctccgggatgccctccggctgagaacaccatcagcagaatgaccgtggcaaccgcggcaggcagaacgatcaggaaattcgttttaaacttgtccgacattttcgtcttttgagtgcggacagcggcaatggtcgtatcggaaataaatgataagttatcgccgaacatcgcgccccccacaaccgcagcaaccgaatatgccgccggaacgccgatttcagcgctaatccccgctgcgatcggagcgagcgcagcaatcgttccggttgacgtgcccatcgacacagagataaacgcagcgatgataaataaaccggcaaccataaactgccccggtacaaatgaaagcgcgagattaacggttgattcgacggcccccatcgcctttgcggctgatgaaaacgctccggccaaaataaagatcatcaccatgatcattatgtcggggtgcccggcgcccttcgcaaaccactccgtcttttggctgagcttctccttcctgttcttcgccagtgagacaaccgatgccgcaagcgccgcggccacgattggcaggctgtaaaagtcgcctgtgatcaagcctgatccaacgaataaacaaacaaataaaaacagcggcaaaagccctgaggcttttccgttttgattttgcatgatgtacacctcttctgtaggttcaaaccgttttttcaccaatatccaacactttaaaaggcgcacgcgcaaaagtcaaatggtaaaataagttctggagaaatcaaatcaaaagcgggggaagccgatggatcgcaaaacgaatcttcttgaattgacaaaggaagtcgcagaaaagcacgccaattttcttgtttcggaagtgaacgaccattgtatgcgaattgccgttttggagggcgaatacgtatggcatatccatcccggctcagatgaactgtttattgttttggaaggggagctgttgatcgattttcaggatcgccccacagaagttctgaaagcgaatgattccctgctgattccgaaaggcgtcattcaccggacacgcgctgatgtcaggtcggttaacctttgtatagaaaaaactaatgcggaaaccgtcccgttcgcggaagggaatgtgctgaagctgatacggtgcaaatcagccgaacaaaagcttcaagcattcagcgaggcgcaggccaaatgggctccgctgcaaaacgtcagcggattcatcaggcagtggggcggatggatggaaacagaagacgggccggaagccgtcgtcctggcgctttggaaatcgaagcacgattatttgaactttatggcggaacatcatgatgagatatatgaaagaacgcatcagaaaggcacattcgaatccatcaacattacgctgtttgaagatcctgccgagatatctgaaacgctgcagaacaatacgccggctccggtaccggaatggacggtaatgggcagcggacgattgcgcgatccacactctctttcgtgaatgtgctatttgtgtttactctttttgaaatgtggaatgtaaaaaccataacacttcaaaaggaggaatcaaaaatggcaaacaataatgacgacaacaaaatgagcagggaagaagcaggcagaaaaggcggagaagccacaagccgcaaccatgacaaggagttctatcaagaaaacggcgaaaaaggcggacgccaaagaagaagcggttaatgtgcggtgaagagaggggctgacaaacagcccctctctttttatgaagatgcctgccgctgccgcttgaacgcccatattaaattattataaattattgatcttctgaagagatttccggtctgttttgttatataatttacagatgatgcatcaaattgtagttataaaagtttgaatgctaaaagttaaggactaaagtactggtgggagtgtaccgaatggcagcgttgattaaattttttcagcatcctggggtcaggcgtttttcagtttttgttgtattggcgggggttttatatctgttccgcagcatgatgaatctcatattgctcacatttatctttacgtttttgatgaaccgtctggaaaatgtgatccgcggttttttaaaccgctttattaaagtcagccagagactgattatttcttgtttgtatgcggctcttgccatcgcgctttcgatcggcggtgtggtctattaccccgtaatagtcacccagattcagcagctgatcaaacaaggaaagtatatcgcttctcaccctgacagcattccttttctcgatatgatcaccggtatgttcggcgatatcaatttgacatcctatttggaaaagggtcttaactttatctatacatatatcacggatatcagcacgtttggcctgcaggtggttatgtcattggttctcagcatgttcttattgatcgaaaaagacaaagtcatgagcttaatggataaatttaagacgagcaaaatagctattttctacgaggaaattgcttactttgggaaaaaattcacgagaacgttcggcaaggtgcttgaggctcagtttattatcgccaccatcaattgcgcactgacgaccattgccctcgccattatgggttttcctcagcttttcggccttgccgtcatggtgtttttcctcgggctggttccggtcgcaggcgttgtgctctcccttattccgttaagcattatcgcctacagcatcggcggaatcgcttatatcgtatcactggtattggtcatcatgatcgtccatgcgatagaggcctatttcctcaatccgaaattgatgtccgcaaagacggagctgccgattttcttcacgtttatcgtgctgattttttctgaacattttattgggatttggggtttaattatcggtattccaatatttgttttcctgcttgatatacttgatgttacaaatcaggagaaaaaccgaacagcaggcacacgaaaatagcatatatttgtaaatcgaaaaattcggtttacatatttcgaattttcaggtataactgttatataacgaaatagcgccacacgtttaatcctttagtaggagtgggggacccgatcatttggggtgaatttttctgttcccgtgcgaaccgaaagacggacatctcttcgtccgaacccgtcagctaacctcatcaacgtgaagagagtcatgtggaaccaattttaatggtaaaagcccgtgggagatctctcatgggctttttttagaaaggggagatatgttatatgaagttagcaacaaaaattattatcgctctattgctcggtgcagtcgtcggtattatactgaacgtcacttcaccggatttattcagcaagcttaatacatttttattcgggccgctcggcacgatcttccttaacttaatcaagatgctcgttgtaccgattgttttcttttctctgactttaggggtagcaggacttggagatccaaagaaattgggcagaatcggtgtcaaaacgatttctttctttttaataactactgcaattgccattattatcggacttgttttagcgttggtcatcaaacctggaacgatcggaacatatgatacaagcgctgcggaatattcagcccagaaagcgccaagcatttctgacacgcttttgaatatcattccgacaaacccggttcaggcaatggctgaaggaaatatgctgcaaatcattgctttctccattttggtcggtctcggaattacgatgctgggcaaaaaagcggacgctcttctcaaagtggttgaacagggtaacgatctgatgatgtacctggtcaatcttgtcatgaagttcgcgccgtacggtacgttcggcttgattgccggggcaatcggaagccagggctgggacgccattaaagcaatggggctttatatgatcgtcgttattctggcgctgttcattcataccatcgtcacatacggcgcagcgattgcgcttctggcaaagcggaacccgctcacattctttaaagatttttcagaggttatgcttgttgccttcagtacgtccagcagcaacgcgacgcttccggtttcgatggatgtcgctcaaagaaagctgaaagttccagagccgatctcaagctttgtccagccgctcggagctacgatcaacatggacggaacggcgatcatgcaaggggtggcaacagtctttatcgctcaggtgtacggcaatgacctgtcgctcacacagctgttgatggttgttctcacggcagtgcttgccagcatcggaacagcgggtgttccgggtgtcggactcattatgctcgccatggttcttcaaacagttggccttccagttgagggaattgcgctaatattgggaattgaccgacttctggacatgattcgtacggctgtcaatacaacaggcgatgcagcatgtgcggtcatcgtcaccgagacggaaaagaaacacggcaaaatcgaagcccctcatagtgaagtgtccgtgtaacttaagaaatgatataatcaaacagtgccttttcggcactgtttatttttttggaaagaggagggggctatgacaaagcagcctgttttacatatagaaaatgttgataaaatcatagacggcaaaacgatattgaaagatatccgcttaacggcggatgaaggggagatcatcggtctgcttggtccgaacggatcaggaaaaacgaccctcatcaaattgatcaccggtttaatcaaaatgaagagcggatcaattgtcataaacggctttccgattgaccgccaatttgaaaaagcgatccagtccgtcggagccattgtagaaaatcctgaattctatccgtatctgacaggctatgaaaatctgaagcactatgcaaatatgcacgctggaatcggacgggaaagactggaggaagtcatcagcagagtcggccttgaagatgccgcagaagacaaggtcaaaacatactcgcttggaatgaaacagcgcctcggtattgcccaggcgattcttcaccggccaaaactgctgattttggacgagccgacgaacggattggacccggcgggaatgaaagatttccgcgaacacttgcgtgaactcgccgaagaagaaggaacggcgatcctgtttgcgactcacttgctgaaggaagtggaagatttatgcgaccgggtcgtcatccttcaaaaagggaaaatcaaatcaactgtcgtccttaatcaagcggacgagaaacaggaaaaggcgatgctggaggtacagcctcatgacaaagcgcttcagtggctgaaagaccaaggatacgaagctcgcaccgaaaaaggcctgcttgccgtaaaggtggagaaagcgcaaattccggctttaaatcaacagcttgtcgccaatgatattgacgtctattcgatcgctccgtttaagcagtctcttgaggatgaatatatggcgcggacgaatggaatagaagagaggaatgctgatgtttaaactgattcaaaacgagcatgttaaattgctgaagcgcaaagtaacatttgtatcgctggcgctgattgtagtctttcaatttctcctcgcgctcatcaccaaaagaatcctgatgggcgccggggcagaggatcattttatcggctatttttcattcaccccaaacctgaatatcctcttgcaggggctttcgattgtggtggcggcttcaattatatcctttgaatatgataaaaagacgatcaagtttttgctgatccgccctgtcagaagagaaaagattctcgtttctaaatacgtgacgagcgtgctcgcaagcatttggctttttattatttactacggattttctatattgttcggcctgctctttttcggcgtgaagctcgacgaaaaagcggagccgctctttatcaatacggtgaaaatgatcgggacgcagtggtttgaagtatggatgatggtttcatttgcgtttttatgctcggcattattcaaaagcagcgcgctcagcatcatggtgtcgattgtcgtgctgtacggcgccaaaatgcttgtgacgattatggcgtatttggaaaagccgctcggcaagtttttattgttcgccaataccgatttaacgcagtacgccggagaggcaaagccgctttttgccgggatgacgcctttattctcgctcttcatcgtctttatccatctcgtgttttttctcggaacggcatggtggggcttttgcaaacgcgatatgaaggtataaataattgtccaaagtgtgacaaaaggaatgacatttttgtgaaatatgtcgtaattaccgtgtgaatctcctattctcaattataattttaggaagggaatgggggatgagacatctatgaaaaagtttattacggcgttgccgattgtattgctgctgtcattttcatttgtttcttttgcctttaactttgatcatctcgtatattttagacttgcgctcggactattttcgcttgcaggtttgtttctgttatataaattgaaaaacggcgtccgcctctttatggcatacctttatggaagctggatcgtgctggccggaatcgccgcatatgaagaaccgcttttttccgatttcttcttcggcggcctcacgatcacgatgggctacttaacctacatgctgatttatctcggtatgaaggttgaccgccgcggcggtcaagccgtttagtcaaaagcgcacctcgctgaaggtgggcttttttgttttgccaaggctatcatttgcacaacgagccgagaacgaactataatacttattaaatctatcggaatttggtcaggaggatgccggcgtgtgttcaatatttgtgaaaacggaaaggcagcaggaatggctcgataaaatcggaaaattggcggatgaatttgagaaaacagcagcgtactatgacgaacatgccaatttcccgcagaacatattcaaaagctgcgggattcaggctacacagcgctgacggtcggaaaagattacggaggagaaggcatttcgctctacgatatgcttttgtttcaggaacggcttgccaaaggagacggaccgacggctctcagcatcggctggcacttaagcgtgatgggggaactggcggagggaaacagctgggaccgggatgtgttttcatcgctttcccatgaagcattaaagggcgcgctgatcaacagagcggcaagtgaagcgcagacaggcagcccgacaagaggaggacgccccggaacccatgcagtcaaaaagaacggcggctggattgtaaacggccgtaaaacattcacaacgatgtctccggttctcgactattttcttgtcaccgcttggattgaagagaagcaaatgatcggcgttttcttgatccataaagatgcggaaggcttggcaatagaagaaacgtgggatatggcggcgatgaggggcacgggaagccacgatttggtgctgaccgatgtccgtctggacgaatccatgcttgttgaactgttggctggtaaaagaaccgataaaatcaacggctggctgcttcatataccggctgtctatttagggatcgcacaagcagcgagagactatgctgtccaatttgcaaaagactatcagccgaacagcttgaaaggtccgatcaaagaggtgcccgctgttcagcgccatatcggcgaaatcgatctggaactcatgaaagcccgccactttatgtatcatgttgcagagctttatgatgatccggagcgccgcgcccttttgacaggtgagcttggagcggttaagcacacggtaacgaatacggccattgctgtcgtagacaaggcgatgagagtcgtcggagcgaaaagtctcgcaagaacgaacccgctccaaagattctaccgcgatgtccgggcgggcctccacaacccgccgatggatgatgcgacaatcgccaagcttgcaggaattgcattcagcgaatagttttgtcattctttaagctttagcggggtgtcgatccgctaaaagaagccgttcaaaatcagcggcttcttttttatgtttgttttgcttttgaaatggccaaaaggcggttctcgtgtctgcggtcgatcttgtcataaatgacttccatttctttcgggttcttggcgatttcttttttatattcttcgacaagctgatgaaaggttttaatcttccgttttgacatgtttatccgcctttcttgatggattggtattcgctttcaagttcgcttaaagacaattcgtagaggtggcgctcttcttttttatatatgccaagctggataagacgctgaatgagttgtttctttctcatttccaccgctttctttaattgaggggccatgtgatcacctcgtcaaccattagtgatattgataatcattatcaattaattgcattatactaaacctgatcaccgaatgtaaagcgacatcttcgaaagaatattgaataaaatcgaaaaatatgaattattatccaaaagaatatataaaaaaagaagccgacaagggcttcacaactagaaaaaataattgcaaaataggaacaaaaaacattctaccggaatataaaaaacgaatcaagaactttttatgaaatttcgacattttaagtttcccgggaaatactcgtgtcgaattttttaaagctcattcttttatgaaacaaattttgctgctgtcccgtcttgtataaaaaggacatgggggtgctcccatgtccggcggttcagacaaaaaatcaggactttaaacgaattagctaatatgttcagccaggaattcattcacttcttcaggcgttttggcatttgcgctgtgaaggtgtcccgttttttcgccgtttttgaaaatcaacaggcttggaatgcccatgacctggtacttgtcggcaagttcaggaaggtcgtctttattcagctcataccagtcattttcctgataagcctcaagaatgtctccgatgaacatgttcatgcgtgtgcagtccgggcaccagtcagcgtaaaatttgacgatgatttctttatcggattggatcaattcattaaattgcgcttctgttgtgatttttttcaattgcaacctctccttttcaatgccattttaatataaaatgaaaaggatttacatacaaatgctttttatatgctgtttttagaccgtattaaaataattagatcattttcccgggaaagtgataagatagtaaagatgaatccagtggggggagtacgaattgaagacaagattaggattggtatacggcggaaaatcagcggagcataacgtttctctgcaaaccgcgctggccgtcacgaaagcattagatactgaaaaatttgatatacacccgatttatataacagaaaaaggcgagtgggtgagagggccgcaactgacagaaccggtttcaaatgtgaaaatgctgcaatttgaacagacgggccagacattttctccggctgtgttgaaccgcgatatgtttcctggcgaagctgatgcaaaagaagactctatcgatgttgttttcccgcttttgcacggaccgaatggggaagacggcaccattcaagggatgcttgaactattgaatgtgccatatgtgggcaacggagtcttggcttcctctgcgggcatggataaagtggtcatgaagcatctgtttgcacaggcaggtcttgaccaggcgaaatacgtttcatttttgaaaaaaacttggagtcagtctaaagaagaatgctatgctcaagtggaaggggaacttggctatccgtgctttgtaaaaccggccaaccttggatcaagcgtcgggatcagcaaatgcagaagccgtgaagagcttgaccaagcctttgagcttgcattccaatatgaccggaaaattgtcgttgaagagggcgtcatcggacgggaaatagaactcggcgttttagggaatgatgaacctgtctgctcagtcgcgggggaaatcgctccgaagaaagacttttatgactataaagcaaaatatgaagacggcgatactgatttgattattccggcttccctgacagaagacgaatacgaaacaatgcgcagcatggcggtcaaagcgtttcaggcgattgacggttcaggccttgtgagagcggactttttccttacaaatgaaggcagggtcctgatcaatgaagtcaatacgatgccgggattcaccccgttcagcatgtttccgcttctctggaagcaatcaggggttgagtacgctgaactgattgaaaagcttgtcgctttggcaatcgagcgccacgaagaaaaacagcagattaaacatacattttaacgggacggagcggaccgaatccgggagctttcatggagaaaggcgctgaaggcggttcgcccttagatacagctgcagacactatccttatttgtggtagtgtctcttttccttgcagaagaaagagagggacatacatgataacaagaacggtaaaagaaattgctgaaatgtcggaaggcgttttgacgaatgaagcttttgaagggcgtctcatcaaaggcgtctcaaccgattcgagaaaactggcgaaaggccaactgtttattccgcttgcaggcgagcggttcaacggacacgtttttgcagagcaggcttttcaggaaggcgttgcggccgtgctgtggaaccgaagtgaaccgaatcctccggaagggaagccggtcattttagttgacgatacgctggaagcgctgcagaagcttgcgaaggcatacaggaatcagctggacgtaaaagtcgtcggcgtgaccggttcaaacggaaaaacgacgacaaaagacatgattcatgctgttttgggcactgagtataaagtgcataagacagaaggaaactacaataaccatatcggcctgcccctgacgattctggcgatgcccgaagacacagaagtcgccattttggaaatggggatgagcgccaaaggagaaatcgattttctcactcgtctggcgcggcctgatattgcagtcattacaaacattggtgaatcacacctccttgaactcggatcaagagaaggaattgcagaggcgaagctcgaaattgtcaatggtctttcaaaagaaggcacactcatttatgtcggagatgaaccgctgctcaccgaaaggctgaaccagccgccttacgatacaaagacgtttggagaggatccggctttcgattatcagcttgaggatatgacacagactgaagaggggacggcattccgcgtgagaggaatcgaaaacgggttcttcatcccggtccttggaaagcataatgtgaaaaacgcattagccgcgattgcggccggagacctcttgaatgtcagccgcgctcacattgcagaagggctgactaaactgaaagtgaccggaatgcggcttgagctagtaaagacgccggacggcgttgcgatcattaatgacgcctataatgccagcccgacatcgatgaaagcggcgatcgagcttgtcgaacagatgaagggatacggcaagaagattcttgttctcggcgatatgctggagctcggagaaggagaaaaagcgtttcatgaagaaatcgggcaggcggtcaacccggactcgatcgactttttatttacgtatggagaactcggtgcatatattgcaaaaggggcgcttaaacatttcccggaacaccgcgtccttcatttcaacccggaagaaaaagacagtttgaaaaagacactgaaagaaaaagcgaatacaggggatttaatcctcgtcaaagcgtccagaggcatgcgccttgaggatgttataaaagatttgtaagggaactttgaatcataaagtcgttttttatgtgatgatcagtaaaagaaaacgggtgaatggtcatgataggatgtttatgcattcacggatttaccggagcgccgtatgaattggaaccgctggcttctcatttaaaacaaacggcagattggcaagttgaaatgatcacgctccccgggcacggtgagatgccggttttaaaaggcgtctgttttcaggaatggatcgcttgtgctgaagtggagctcatccgcttgttgaaaacgtgtgatacggtatttttaatcggattttcaatgggcgggatgattgccggctatttagccggaaaatatccggtcagccgccttgtcctgttgagtgcggccgcccagtacatcagcccgggacagctgatccaggatttgaagaatgtgatcaaagattcactgcaaggcaagctagaggataatctgctttacaaaaggtacaaacaaaagctgacaagcactccggtgtcttctgcatttcagtttcgcaagctcgtcaagatgacaaagcctgcattgaaaaacctccggatccctgtgctcattgttcagggggagtgtgatgccatcgtgccggtgtcaagcgcgtattacttgtatgaaaccattccttccgaagaaaaagagctgtgcctcttgccggaatccaagcaccatgtctgccttgaagaaaactcctctatcctatttcaaaccgttgaggagttcctcaaaaaaacgccgattgaatctataaaaaaataaataattgaacggaaatctgcaaaaaataatccgggatgctgacagggaaaaaatgaacgtatgctgtcgaaagcagcacatgcctgtgttacaatgtgtaaaggacgccttcgggcgggctttagttgcacggacggacggcttcgcccgaggttcataggagactgccgaaccggcgagagagcacaccgctcattctcatcttgttgaaaaacgtataatggaatggtaatataacatgtaaagtaattcgggctttgcataagtatggacctgtcctttgcacaaagggcagtttttattgataaaacacgattactgaaacagtaagcagaaggagtttgaatacattgacaataacgtttcaagattttcaattaagttctgatctcacaaaagcaatcaagcgtatgggatttgaagaggcaacaccgattcaggcacaaacgattccactcggccttgcaaataaagatgtgatcggacaagcgcaaacgggaacaggaaaaacggctgcatttggcatcccccttgttgagaaaatcaaccccgagtctcctaacattcaagccattgttatcgcacctactcgtgaactagccattcaagtttctgaagagctatataaaattggacaggataaacgcgctcgcgtgctgccgatttacggaggacaggatatcggacgccagattcgcgcgcttaagaaaaaccctcatattatcgtcggcacacctggtcgtctgcttgaccatatcaaccgccgcacaatgcgtcttcaaacagtgaacaccgttgtgcttgatgaagcggatgaaatgctgaacatgggattcatcgaagatatcgaatccatcctttccaatgtgcctgctgaacaccagacattgctgttttctgcaacaatgcctgctccgattaagcggattgcagaacgtttcatgaccaacccggagcacgtaaaagtgaaagcaaaagaaatgacagtatcaaacatccagcagttctacctagaagttcatgaacgcaaaaagtttgatacgctgacacgccttcttgacatccagtctccggaattggcgatcgtattcggccggacaaagcgccgtgtcgatgaactgacagaagcgcttaatctgcgcgggtatacagctgaaggaattcacggagatttgacccaggcgaagcggatggttgcactccggaaatttaagcaaggcgcgattgaagtgctcgttgcgacagacgttgcggctcgcggccttgatatttcaggtgtaacgcacgtctacaacttcgatgtgccgcaagatcctgagagctatgttcaccgcatcggaagaacgggacgcgcgggcaaaacaggaatggcgatgaccttcattacaccgcgtgaaaaggatatgctgcgcgccatcgagcagacgacaaaacgcaaaatggaccgcatgaaagcaccgactctcgatgaggccattgaaggacagcagcaggtgacggttgaccgcatccggacgatcatcgaggaaaataacctgaacttctatatgacggctgcagcggaattattggaagaccatgattctgtgacagttgttgcggctgccattaaaatgatgactaaagagccggacaacacacctgtccgtttgacggaagaggctccgctcagaacgaagcgaaacaaaaatcaccaccaccgttcatcaaaacgcagagacggcggcggctacagaggaaagaacaatcgttcatcttatgataaaaagcgttcttcgaatgacagacgccaaaaaaaatcatataattcataatcaaaaggcggatccttttttacggattcgccttttttaaactaaagcctttaaacgaaacattttcagaccgaagaccgtaaatagaatgagattgggggaatcgagttttgagaagcgagccgaaaaatcaaatcagccgtgatggcgttaaagtctggagaatcacggcttgtatcacatcattcgttttaatgctggctgcagcaggcctgattgccgccggggagatatttaagtggccggtatggatcggcattttgtcagcggccgtttggctggggatttcatttgtcatcattatcatgattccgaatatccgccacagagtctggcgctacgaagtccatgagaacgaaattgatattcagcacggcatctttgtggtgacccgcgtgatcgttccgatggtcagagtccagcatgttgatacatcgcagggccccatcctcagaaaatataatctcgcctccgtgcaaatttcaacagcagcgacgacccattccattcccgctttggatgttgaagaggccgatcagctcagagattccatttccaggctggcaagggtgactgaagatgatgtctgaaccgagacgcatgcaccctgccgccgtcattctcaactttatcaaaggccttgttgagacggttaaaaattttatcattccatttggcgtggtgatttttttaaatcaatcgcaaacagtcaaaatgatagcgatcgccgcggccgtgctgtttttcattgctttggttgtgacgagcatcatcaagtggagcaaatttacataccgtatcgaagaggatgaattgcgaatagaggaaggcttgatcaataagaaaaaaaggtatattccgatcgaacggattcaaacgatcaacacaagcgcaggcctcattcaacaaatgttcaagctggtgaagcttcaagtcgaaacggcaagcggaggaacggaagcggaagtttccctggtcgccattacccaggcagaagccgaacgtattcagcaagcgcttttcgaaaggaaaaaagcggcggaagacacggggaccgatgtcccggttccgctggaagaaactgctgaagaggcggaggaagcggaagagccggtaatgatgtacaaaatgaccggccaggagctcttaaccgccgcttcaacctcaagcggcatcggcgttattatttcaggggtattcgcttttttcactcaagtcgatgatttctttgatttggattggctgtatgaccgctttgcttttttgaacagcgcaggtgccgccgtcatcgcattggccgcctttgttgcccttttcatcgcatggctgctcagcatcgtcgggatgcttttgaaatatgcgaattttactgtcgtgcgtaaagagaaagaaatcgtcatttccagagggctgattgaaaagcaacaaatcacgattccgctccagcggattcaagcgattaaaatcaaggagagcctgatcaggcagccttttggacttgcagccgtcacgatcgtcagcgcaggcggaaacgtcctggaagaagataaatcagccatcttatttccaatcatcagcaaaaaaataatcaatcagcgtctcggcgaattcattccggattatgcgccggaagacgatttgaaccgattgccgaaacgcgcgctgcgccgctatatcctgcgcgcatcctggccggttctcgccgtcgttccgctttccattctgtttccgccatggggctatttgtccgctgtattgattcctttttactggatcatcggctatttctcataccgcgatgccggatggaagatcagcggcagcaaaatcatcatgtcatcgcgcttcatcggcagaacaaccgctgtcattcaacgcaggcgcatgcaggttttcgaagtcagccgctcgtatttccagcgcaaaaaacagcttgtttcgattcatacatcaacaaaatcgtctgttttaatggagaagttttcggtggctgatgttgaggagaaagattcggacgatatcattgcatggtattcatatgaaaaaagagtgaacggttaaaagccgttcactcttttgtttaacaatggcggagccaaggcgagtccgcccagcagaccgaagatgtgcgccatcatattgatattttggtttacaaacgtcatcaaaaccgaaatggcgaggatggtgacgatgatttgggaattggcgctccccatcagctcttttctaaacagcacgatgtacaggtacacgccgaacaagccgaaaatggctcccgaagcgccgacatgcatatactccagcggttcgatgaaatatgtgccgatattgccaatcactcctgctccgatataaacgatgagaaacttgagtttcccgagcattcgttccagcccgggggcaaacaaaaagatcgacatcgaattaaagagcaggtggccgaaaccggcgtgaataaagatcggcgtcacaaacctccaccattctccgttcgctattccccagttaaagccaatcaataaatcagaccacatctgtacggccgtaaacggaaataaaaaaagaatccaaatggcaagctgcagggccaatatggcggatgtgaccgggtagagcctgataaacgtctgaaaattttctgttctgataaacatgcttatgatttaagcccctttacaatgatctcgtacatatatagtaacacgtttatgaacaggcagcggcgattagtacggacgagaaaatgattttggaaggttgtcatgctagtctgcatattgtctgagacacgctcatatattgggtagtgcaataagggagacgagtcgttgcaggcttttatggtacgcacgccgatacagccggccctgttcttatggcgtaccgttaaagtcgaacaagcggtttcttcctttttacatcaatgattaaaaaggggttgaaaaaaggtgagaaaaagctttgttttgcttttaacggggctgcttgtaatccttatgctttctgcctgcggccaaaaatcgcaagaagatgttgtgacggggctcgacaagaaggcaaaagaatacacgtcctataaggcaaaagcgaaaatgaccattgaaacgggaaatgaaccgcaggagtacaacgtggaaatctggcataaaaaaccttctctttaccgggtctatttggaaaacccgaaaaaagaccagagccaggtgatcttgcgcaatgaaaacggcgtgtttgttttgactccgtcgctgaataaaagcttccgctttcacagcgactggcccaataacagcagccaggtatacttattcgaatcgctcgtaaaggatgtcaaaaatgatggggaagcttctttttccgcaaaggattcaaaatacatttttgaaacgaaaacgaattatcagcataatcagatgctgccgactcaggaaatcgttttccataaaaagaccatggctccttcatcggttaaagtgatggataccgaccgcaaaccgatggtaaaggttgagtttacaagctttgaattcgataagccgctcgataaagactcttttgatgaaaagaaaaatatgacgctgtctcaaattgacgtagcgacaagcgctgacgtgtcagactctttcgctgtcaaaacgccgctcgatgtgcctcagggcgtgaaaaagcttgaagagaaagagatggcgactgaagacggcaaacggatcgtcatcacatatggcggtgaaaaatcctttacattgattcaggaaaaagcacgcgtcgccaaaacatccacttccgtatccatgaacggagagcccgttgacctcggcttcacggtcggcgcactgacggataaatcgttgtcatggacatatgacggagtcgattacttcatctcatcagaagatctttctcaagatgaacttctgatggttgcaaaaagcatgcagggacagtcttcaaaatagactgtgccgtacccggcagcctgttttccgcccggaagcggaaagcaggcttttttatatttgcgtcgcaagcgtatgatttcgacagcttttccgtaaaatgcataccgtgccagcaatttttcttttgttcagggctgatgatcccgtgcaaaatttccctttctccgaactttttagtatgatgggaaggacgagtgaaacaaggaacaggaagtgtcatgatgagcttaaaaccattctatagaaagacatgggccgaaatcgatttaacggctttaaaagaaaacgtccgcaatatgaagcggcacatcggcgagcatgtccgcctgatggccgtcgttaaagcgaatgcctacggacacggggatgcacaggtagcgaaggcggctcttgcagaaggggcgtccattcttgctgtggctttattggatgaagcgctttcgctgagggcgcaggggattgaagaaccgattcttgtcctcggtgcagttccgcccgaatatgcaagcattgccgcggaaaagcgcattatcgtgacgggctattccgtcggctggctgaaagacgtgctcggttttctgaatgaggccgaagctcctcttgaatatcatttgaagatcgacacgggcatgggccgccttggctgcaaaacggaagaagagatcaaagaaatgatggagatgaccgaatcgagcgataagctcaattgtacgggcgtgttcactcatttcgccacggcggacgaaaaggacaccgattatttcaacatgcagcttgaccgctttaaagagctgatcagccccctcccgcttgaccgtttgatggtgcattcgtcaaacagcgccgcgggtctgcgcttcagggaacagctatttaatgccgtccgcttcggcatcggcatgtacggtttggcgccgtcaaccgaaataaaagacgagctgccgtttcgtctgcgggaagtgttttcgcttcataccgaactcacccatgtgaaaaaaattaaaaaaggcgagagcgtcagctacggggcgacatatacagctcagcgcgacgaatggatcgggacagtccccgtcgggtatgccgacggatggctgaggcgcctggccggaacggaagtgctgatcgacggaaaacgccaaaaaatagcagggagaatctgcatggaccagttcatgatttcccttgccgaagaataccctgtcggcacaaaggttaccttgatcggaaagcaaaaagacgaatggatctcagtcgacgaaatcgcccaaaatttgcagacgatcaattatgaaattacctgtatgataagttcaagggtgccccgtatgtttttggaaaatgggagtataatggaaataaggaatccgatcttgcctgatcaatcctgaaaattgatgaattagcggaaaaacaactttgcttgcgaaaagaataatgatatgattatgaatggaatggatagagtgttgtatccgtaagtttggtggaggtgtatgtttttgtctgaatccagcgcaacaactgaaatattgattcgcttgccagaagctttagtatcagaactggatggtgtcgtcatgcaagataacgggagcagaaatgaactgatttaccaagccacaaaaatgtatttacgcgaacgcaaaaatcgacaaattcgggaatcgatgagacgcggttatatggagatggccaagatcaatttgaacatctcttctgaggctcaatttgcagagtatgaggctgaaaacacagtagagcgcttagtaagcggaggataatcatttgattgttaaacgcggcgatgtttattttgctgacctatctcctgttgttggctcagaacaaggcggggtgcgcccggttttagtgattcaaaacaacatcggcaatcgcttcagcccaactgctattgttgcagccataacagcccaaatacagaaagcaaaattacctacccacgtcgaaattgatgcgaaacgctacggttttgaaagagactccgttatattgctcgaacaaattcggacgattgacaagcaaagattaacggacaaaatcacccatctcgatgatgaaatgatggaaaaggtcaacgaagccttacaaatcagtttggcactcattgatttttaatattgatgaaagttgctcgaggcgaaagagcaactttttttgtgttcaaaaataacaaacgatataatggaactgttagtccaaaaaatgttatcagatgtagtcagggggatgaacatgtcgaatcaagcggtgttaaaatttatctcggaacaccaaaatgtactcgccgggaatttggcggatattctgaaagacttaaacagcaacatgacaaacgtgaagctgactgaacacatgtatgagacgatcagcaatgaatatattcatatcctcatgaatgagtccggggacgggaatgaaaaatcgatcgacaccatctaccagttctcttcaaaagccgtacagctcggcgttccgctgaagctgctgtcgtcgggattatcagctttttggaagcacctttactatgaaatgaacaaggatgtgccggaagatcagcagtgctatgatttgatttgggaaatcgataaatttatcgaaccgatcaacagcgaaatcttgaatcagtatgcgatctcctgggagaaaaccgttgctctgcaaaaggtcgcattacaggagctctcggcgccgctgatcccggtttttgaaaatattacggtgatgccgcttgtcggcacgatcgatacggagcgggccaaaaagattatggaaaacctgttgagcggcgtcgtcaaacaccggtctgaagtcgtgctcattgacattacgggcgtgcctgtcgtcgatacgatggtcgcacaccacatcatgcaggcttccgaagccgtcagacttgtcggagctaaatgcctgctcgtcggaatccgcccggaaatcgcgcagacgattgtgaatttgggaatcgatttaactcaggttattacaaaaaataccctgcaaaaaggaattcaaaccgcattagaaatgacagacagaaaaattgtttcattggaggaataatctttgagggtacctaacattccaattttgaagctgtataactgtttattggtatccattcaagtagagctcgatgaccaaaccgctctgaaattccaagaggacctgctgaacaaaatatatgaaaccggttcgaacggagtggtgatcgatctgacttcagtggacatcatcgattcattcatcgccaaagtccttggcgatgtcattacaatgtcaaaactgatgggcgccaaagtcgttctgactggcatccagccggctgttgcggtgacattgattgaactcggcatttctttggacgagatcgagacggcgctcgatctcgaaaaggggctcgagacattgcagcgggaattgggggaataaatatggcagaccaatcctgtgtgaagattttgactgaatgggacatagtggccgccagacagcttgggcgaaatgtcgcaaaagaactggggttcggcacagtggaccaggccagaatcacgacagccatctcagagctggcgcgtaatatttatttgtatgccggaaaaggccgaatctgcatcgaacaggttcaggaagaaggaaaaaaggggttgaaaatcgtagcggaggatgaggggccgggaatcgctgacatcaaaaaagtgatggaagacggtttttcaacctcaggcggcctcggagcgggcctgccgggagtaaagcgtctgatggaccaatttgaattgcattcggacgcggaaaatggaacggatatacaagccgtaaaatggctgcggtaggagggaaggaatggatttcagggaagtgattgagcagcgctatcgacagctgcttagccgttatatatctgaattaacagagacatccctttatcaggggcagaaattcagcagaaaaacgattgaacatcaagtgccgccggaagagattatcagcatacaccgaaaagttctgtctgaattatatccggatcttccagaccatgtgttccattctctcgattttttaattgaagtgatgattggatacggtttggcctatcaagaacatcaaacattaagaggaattcagcaggaaattaaatcggaaattgaaattgccgcgaatgtccagcaaacgctgcttgagacgacggttccgaaagttgaagcgctcgaaatcggtgcggtcagcgttccggccaagcaaatgagcggtgattattatcattttgtgcgcgacaaggaatcgattaatatcgccattgcggatgtaatcgggaaaggaataccggctgcgttatgcatgtcgatgatcaaatatgcgatggactctctgccggattcgggcacgtctccttcacaggtgctgaaaaacctgaacagggtcgtcgaacaaaatgtagacccaagcatgtttattacaatgttttatggcaactatcatcttcaaaaacacctatttacgttttcatctgccggtcatgaacctggcttttattattcttgcagggaaaataaattttacgatttaaacgcaaaaggcctcgttcttggcatttcatcaaattacgactatgagcagtacgagcaaaaactggatattggcgatatgatcgttcttttttcagatggtgtaactgaatgccggacagacagcgggtttttggagcggtctgacttgcagaacctgattactgtacatatggagaaaccggctcagcaaatggttgacaatatatacgaacatctgctcaagcttcaggattttcagcttcatgatgattttactctcattgttttaaaaagaaaggtttaaagcttctcttcgctgggtaataaaccagtagctcattaagagaaccagaggtgatattgtgaatttggcagttgatacgaataaaaatgaccatgtgatagaagtaaaagttgcgggcgaaattgacgtgcacacggctccaacactgcgggatgagctgatgccgctcgcggaagaaggaaaagatctcaaagttagtctgaaagacgtttcatatatggacagcacagggctgggtgtattcgtcggcatttacaaagcggtaaacagaactgggggttctttagtgcttgaaaatctgtcagagcgtttgattcgtttgtttgatattacaggtttaaaggacatcattgacatttctggaaagtcagagggtggattataatgaagagagcagctgattacattgaaatgaagtcacctgccaaaccagaatacgtaggaatcattcgtttaaccctgtcggggattgcaagcaagatggggtattcttatgatgacatcgaagacttgaaaattgcggtcagcgaagcgtgcacaaacgctgtgcagcatgcttataaagcagacaacaacacaggagaggtctccgtcagattcggcgtgttcgaagaccgcctcgaaatcgtcgtcgccgatcagggagacagttttgatattcaggataaacagaaggagctcggaccatattcccctgagcatacggtagatcaattgtcagaaggagggctcggtttatatttaatggagacgctcatggatgaagtgcatgtccagattgactcaggcgtaaccgtctcgatgacaaagttcttaaacagggagcgagttgatgatggcacaaccgtccaaaactacgaaactaactaaaaccgaagtcgacacgctgattaaaaaatatcaggagaaccaggatgaagacgctcagctgacccttgttcaaacatataaaaatctggtggaaacactcgccaaaaaatattcaaaaggaaaaagctttcacgaagatctatgccaggttgggatgctcggattgcttggagccatcaaacgctatgaccccgatgtgggaaaatcgtttgaagcgtttgccattccgaccatcatcggagaaatcaaacggtttctccgagataagacctggagcgtccacgttccgagaaggatcaaggagctcgggccgagaatcaaaatggcggtggatcatttaacgactgaaacgcaaaggtctccaagagtcgatgagattgccgagtttcttgacgttacagaagaagaagtgctggaaacgatggagatgggcaaaagctatcaggcgctttccgtcgaccacagcattgaagctgatgcagacggcagcacggtgacgatcttggacatcgtcggctcgcaggaggaaggctatgaaaaggtgaaccaaaagctgatgcttgaaagcgtattacacgtactatccgaccgtgaaaagcaaatcattgagctgacttacattcaaaacaaaagccaaaaagaaaccggcgaaatgctgggcatatcgcaaatgcacgtctcacggctgcagcgcaaagctgtcaaaaggctgagggaagcattggctgaagatccgtatatggagcttaaaccatgatttggactgagtcgaatgaacacatgcaagcgcttgtttatcagcttcctaaagaaggaaaagccgtctgcggtgacagtttttatttccatgcgactgacgaaaccatggtgtgcgcactggctgacgggcttggcagcggtgcgttggcacgcgaatcctcttcggtcatcagcgaagttgtcgaagagcacggccatgaagatgtcgaaagcttgatggaacggtgcaatcaagcgctgaaacataagcgcggtgcgaccgtttcaattttaaaagtcgattttcgaacaaggacgatcgcttacagctctgtaggcaatattcgctttatcttatacgctccttcggacaaatatatccaccctctccctgtgacgggatacatgtcgggaaaaccgcaaacatacaaaacattcacctatacgtatgaaaaaggatcaagattcatcatttattcagacggtttggaagtacccgccctccggacttatttaaaacagcaccatacaccgggagatatatcgaatcagcttgaatcatacacacgaatgggaaaagacgatctcacctatatcattggacagcttttttaaggaagctgccctttgatataggtgtttttccgtttcttttggtacactaagaagacaacattcttttggaggctacaatggatactttagcgtcaatcgtcaaacaaatcgcaaaagaaacggggcttgcgcccaagcatgtcgagagtgtcattcaattattagaggacggcaacaccgtcccctttattgcgagataccgaaaagaacaaacgggctccatggatgaagtccaaatacaaactatctccgaacgctggggatacattcagcatttaaatcagcggaaagacgaagtcatcaggctgatcgatgaacagggcaagctgaccggacagctgaagctggatatagaaaaagcagacaagctccaggaagttgaagacttatacagaccgtttaaacaaaaacgaaaaaccaaggcgacgatcgccaaaagcaaagggcttgaacctttggctgatttcatcatctcgctcccgcgtaatgaagatgtagcagccgaagcccgcaagtacataaatgaagaaaaggaagtcatgagcgccgaagaagcgcttgaaggagcaaagaacatactggctgaacggatctcagacgaaccggaatacaggaagtggatcaggcaggagacttttaaaagaggaacgctgaagtccgcggcaaaagatgccgaagcggatgagaagaaaatctatgaaatgtattatgaatacgaagagccgattcaaaaaatcgttcctcatcgcgtactcgcagttaaccgcggcgaaaaagaggagattttgagagcgtcggtcgagccgccggcagaccgcatccaagcttacttggaaaaacggattttacaacaaaagcaaacaagtgctcaagatgtcctgaaaagcgcgatcgaagacggctataagcgcctgattcagctgtcaatcgagagggaaatcagaaaagaattgacggaaaaggcggaagaccaagcgattcacatatttgccgaaaatctgcgcaagctgctgctgcagccgccgatgaaaggaaagctcgttctcggcgtcgacccggcattccgcacaggctgcaagctggcagtcgtggatgagacgggaaagatgctcaagatcgacgtcatatacccgcaccctcccgtcaataagaaaagcgccgccatcgaaaaagtaaaacgcatcatcgaagactttcaaatcgaggtcatcgcaatcgggaacggaacggcatcaagagagacggaacagtttatcgccgatctcttgaaggacatcgacagaaaggtgtactatctgatcgtcaatgaagcgggagccagcgtctattcggcatcagagcttgcgagggaagaattccccgatctgcaggttgaagaacggagcgccgtgtcgatcgcacgcagactccaagacccgctcgccgaactcgtcaaaatcgatcccaagtcggtcggggtcggccagtaccagcacgatgtcagccagaaaaaactaaacgattcgctccgctttgtcgtggaaaccgtcgtcaaccaggtcggcgtcaacgtgaatactgcatcagccgcgctcttgcaatatgtggccggactatcgaaaacagtcgcggccaacatcgtcaaaaaacgggatgagatcggaaaattcacgagccggaaagagctgaaagacattccgcgcctgggcgcgaaaacgtatgagcaatgcatcggctttttaagggtgcctgacggcgatgaaccgctcgaccggacaggcatccacccggagagctataaagagacgagagagctcctgaaaaagctgggcctttcaacagcccaaatcggcacaaaagagcttcaggacaaaatcaacgaactgaatatttccgaagcagctgaacagctggggatcggggaaatcaccctgaaagacatttgcgcccagctgacgaggcctgagcgcgatccgagggatgaagtccctaaaccgctcttaaaaaccgatgtgcttcaattggaggacttaaaagaggggatggaacttcaggggacagtgcggaacgtcgttgacttcggggcgtttgtcgacatcggcgtgaaacaggacgggctcgtccacatttccaagctcagccattccttcgtcaagcatccgctcgacgttgtgtcggtcggggacatcgtcaccgtatgggtggaagatgtcgacgctgcaaaaggaagggtctccttatcgatggtaaaagatcgataggacttgaagtcagcccgccggaagctttattttccagcgggcttatcttttacatcgcgattttcaacaggatgcggtggacgacgcctgcaatatgtgccggcgtctgaaccatgccgccgttgatccactcttcaaaaatgccgaccgctccggatactagaaatgtaatttccatttcatcgcatgccatctcattacctgattgctgcatcatgctcaattcttcgaaaatcttctgcttgaaaaaatctttaaatttattgatggtcaaaatgtttcctttcggtttcgtcaataaagtgaagattgcagcgttttgataaatatattcagtcgttttttcgatgaaggtgagcagatggtgcggatcttcgcttggaaaataatcatcgtaaaatttccccagctgatcaaacaactcattctcgatttgttcatacaaatcaaaaacatcccgataatgaagataaaaagtcccgcgccctaaatcagcgcgcctcgataaatcggaaacggtaattttattgatttctttctcatggagcagctttaaaaaagcctcttttatcgctctttttgttttaattgaccttctgtcctccatcggtgacctccgtttataaacaaatttacgtatgttgttcattattgaacatctcaaccccaattgccgattgaacaccccatttgccccaaattataatgaacatgtgtttattaatcaataggtgtttattttttaaaaccttcaaatatcaatggcctatcagccgataagttaatcaagcggtttcagctgttttcctgtaaaatgaatgatctttcacttttgcgaataaagtggtgaagtaatgaaaaacagcaaggacaaggctagcaggcggctttttctgccgactttcttaaaatacaaagaaatcaatctacctgcaaagttcatagaggaggaataaaacatcaatgagaacgattataaaggcgagatggatcattgcggcgctctggattgcaatggccgccgtcttattcatcacggcgcccgatatggggcaattaacaaaggagaagggccagatagcggttcctgaaggctatccgtcttcttatgcgaacaagcttctcgaacaaatgtcaaaagacggggatacgaacaaatcggttgtcgtcgtatttcaggacaaacacctcctgccgaatcgggaggcggctttaaaaaaagcgatcaccactttagagaaggattcctcccttcacgtctcagatattacatcgtactttaacgcggatgaggatattcaaaagcagctgttgtcaaaggatcgaacgacgctgctcgtgcctgtcacatttgatgcaaacaaaatcagtgcggccgaatttaaagcaaaggtcaatgaaaagcttaaaactttaaaacttgactacgagatgaccgggcagccgctcatcgatgatgatgtcatgacaagctcgcaggaaggcttgaagaagaccgaatatatcacggtcggttttattttaatcgtgctgattctcgtattccgttctgcggttgcgccttttgttccgcttttggcggtcgcgctttcataccttgtgagccagtccgtcgtcgcctatctagtcaaatacgctgattttccgctgtccacgtttacgcaaatctttatggtggcgatcatgttcggaatcggcacggattactgcattcttcttttaagccgttttaaggaagagatcgcccgcgggaaagacaagatcgaagccattctgacaacgtataaaacggcggggagaaccgttctgttcagcggaatcgccgttttgatcggttttacttgcatcggctttgccgaattccagctttacaagtctgcggtcgcagtagcggtgggtgtcgcggtcttgattttggcgcttctgtcgatcgtgccgtttttcatggctgttttggggaaagtgctgttttggcctgtcagaggaaatatcgggcacccgcagtcaaagctatgggaaaccgccggccgtttcgctttcagtaagccgctgatcagcctgttgatcgtagcggccgtggccgtgccgccgatcttgatgtataaaggaacgctttcctacaacagccttgacgaaatcggagatcaatacgaatccgtcagcgcatttaacaccatttccgacaagttcgggccgggagaatctttgccggtcacggtcgtgctcaaaacatcggatgcgctcgataccaatgacgggctgatcgcgattgaaaaaatcagccgcgccattgaacagacaaacggcgtcagcaaagttcgcagtgcgacccggccggtcggaaaagggctgagcgacctgtacgtcaaaacacaggcgaacgagctgaataaaggccttgaaagcggcaataaaggtctgaaaaagattaaagacgggcttgcagaagcgagcaagtcaatcgcggatcaaaagccgcaaatcgaagcgtccggaaaaggaatcaaccagctgatcaaaggaaccgaatcgatccaagccggaatcagcgacgttgaagccaacatgagaaagctgaaggaaggaacagaccaaagcaaacaaggcgtcgcccaggcgaaaaaagaaatccaaactgcgaaaaaacagctgacggcgcaagtcgatcaattaaatggacaaatcgaaacctacaaagaaatatcgaaaatcttaaaagcggcattgtctcaagccgaaaatgcccaaggcataacggctgacgtgcaaaagatgattgagcagacaaatcaaaatttcaaaaatcttgaaagcgaaattcccgaagtgaaggagaatccttcttatttggcgatcaaaggctcttacacagagcttgcatcggcaatcaagcagggatcacagaaagcggccgtttacacgaagcaggcggcaaacgcgaaaaagcagcttgaagcagcagatgcatttatcgcaaaagcgcaggaagagcaaaaagtgtacacaagcaaaatcgatgctctgataaacggcctcggccaaatcgaaaaagggcttgaagagacatcgaaggggcagggacagctcgccgattcgctgcctaagctcgaatcaggcgcaggtgaggtcgctgaaggccaaaagcagatgaaggaaaaagtcggagaattcgccggccagctcgatcaattaacaaaagggctgaattcaagcgtggacggcctcgaaaaaatttcaagcggtctgatgggagcaggcgactacctggatcagctgaaaaacgcatcggatcaagaaatgtccggctggtttgtccctaaagaagtgctgaaaaacaagcaatttcagcaggtgtttaattcctatatatcagacgaccgccatatcacgacgatcgatgtgatattggaagacaatccgtatggaaacggagcgattgccaaggtcaaagacattgaagcatcagtaaaacgggctcttcccgacacgcatttacgcgatgcatcgtttggcgtcggcggcgtttccagcatcaacgccgatttgaagcagctgtcagaccaggacttcagcaacacggtgatctatatgatgatcggaatcttcctgatcctcgtcctgctgttccgttcaatcgtcatgccggtgtatttggtcggatcgctggtcttgacgtactttgcatccatcggtgtaaccgaatttattttcacggcgtttttcggctatcccggcctcaactgggcggtgcctttctttggctttgtgattttaatggcgcttggtgtggactattcgatcttcctgatggaacggtttaacgaataccggggaacggatattaagacggcgatgacggaatcgatgaaaaatatgggatcggttattatttcagccgctgtcatcttggcgggaaccttcgcggcgatgctgccgtccggcgttttatcgcttctgcaaatcgccacccttgtgctgacgggtcttttgctgtatgcattcgtcatgctgccgctgttcgtccctgtaatggttcggatcttcggctcagccaactggtttccgtttaaaagaaaagaataaacggctcgtccatccgcagaagaaccattcgcccatgctccccgaaatcgggcggtcagctccatttggggagtaacgggcgccattgtgtgagatgataaaaggaccggtgaagatgatgaggaaacagaagaaaattccattcggactcggatgaacactgctcatcagcagtgtttttttctgtaaaaataccagcactgattcagcaatttaatctggtaatgatctttttcataaaaagctctctgcatctggtttttgagccaattcggcattgctcatccctcctcaggctcttatcataagagtatgggtgtcgtgtattagtttatgccgcccggaatttgtcctgttcaatgtttttaaaaatgaggtggacccaagcaatggatgaacaacaactgcagcagctgacagaacagctttcgctcacatactttaaaaaaccgttccggcaccgcgcttacttcaacagccgcctgaaaacgacaggaggcaggtatttgctcaattcccacaatatcgagctgaataaaaaatacctcacagaacacgggcaaaaagagcttgaaggcatcatcaagcatgaattgtgccattaccacctccatcttgaaggaaaaggctacaagcaccgcgacaaggattttagaacgctattaaaggaagtcggtgcgccgcggttctgcacgccgctcgaaaaagagaaaaagccgcaaagaaaagtacgcacatacaagtgtgaagcatgcggacaaacgtttctccgaaagcggaaaatggatacaagccgttacgtttgcggcaagtgcggagggaaaataaaagaaatcataaaaaagggttgactgatcaggcttgtctatgataaattataaaagccgtcgcaagacgagccacaaagacaaattgttcttcttgacacattttgtcgacatatttataataaaatgagtctgatcattccacagtagctcagtggtagagctatcggctgttaaccgatcggtcgcaggttcgaatcctgcctgtggagccaatggagaagtactcaagtggctgaagaggcgcccctgctaagggtgtaggtcgcgtaagcggcgcgagggttcaaatccctccttctccgccattaggaaaatatgatgctgacttcatatggcccgttggtcaagtggttaagacaccgccctttcacggcggtaacacgggttcgaatcccgtacgggtcatttctcatatgttgggctatagccaagcggtaaggcaacggactttgactccgtcatgcgttggttcgaatccagctagcccagccattatatttgagccattagctcagttggtagagcatctgacttttaatcagagggtcgaaggttcgagtccttcatggctcaccattgttttttcacgcgggtgtggcggaattggcagacgcgctagacttaggatctagtgtctttacggcgtgggggttcgagtcccttcacccgcacttaaaaaacaacatatcatgcggtcgtggcggaatggcagacgcgctaggttgagggcctagtgggtgaataacccgtggaggttcaagtcctctcggccgcataccagagataccaagggttttgacgcccttggtgtttttttatgtctacttcccacgaattagattgcaccggaaatcgaacgatttagggctgtaattgaaaagtacgcccgtgaggaagttgtttttgaccaagtgaatattatcgaccgattgcgccacgctaaccatcttttgcgccatccaatatcgtgtaatccaccactgaatatcataagttgcaccaccgcttataaaaaagccgccaatcatcattcaatacgaggttggtggcttcttaaaataggaattcagcaatctctggcttaaggggggtgattatcatcagtctgtaaggaggtattgtctaatcctccgcccatggctgagaatcactccccggcctttcttatgaaaaatcctttttatattggacggataggtaaatcccagcagctaaaaatgccagcgcatatttgtacaagaaaaagatggtccacatatcatctttaggaaaaatcatgtcacatagaataatgaccaacagcatataggaactacttttcaaatagattttatttgtccgttcgtcgtcttttccaagctttttataaaatacatagaccaaaatcccgctaccataaaccaataaaaaaccaacaacgatgagaatattccaatttcccggagattgttcagcccaggaccttaaaggggaaaaaattgcgttatggatacctgagaaaaacttacttatcattttgatcatttcctttcacataagtaaaaatttcgtttacatcaatattaaaaaattcagcaattcgaaaagccaacagcagagtcggaacataatttcctttttccattacgaaaatggtttgtttggaaaccccgactttctccgctaattcttgctgagacattctggcaagtacacgatattcataaaccttatttgatatcgaatcaccaaagtctttcttcacgaccatcacctcttgaatcaaattataaacttactttttacaaaagtaaagtaaacttatacaaaaggataaaataattttatttttgtttaggttactttgatataacaagagccaaattgcagaaagaacctgacgaaattcttgttccgtcaggttcacattttgctctggtgtaattcatggtttttaatggggcattttatggttttcggtggggcaaagaccggtaagaatggtgcggtcgggtgataatattcactagaaaatcaactttgataagctttactgaaaagcttactccataattaataaaaaacaatcaaattttgtgtaatcgattaaatagatgcaatgaaaataagctttcataaaccatgataagctttcactttattgagggccacccccgtgggaggttcaggtctctcggtttaacaccaaataataccaaagttttaattgcctttggtattatttttttgcggaaaatcggcaaaaaatgtacagcattgtccaagtctgcaagtatatttggcactaaaaaagtgctgacctctgcacaaaaccgttgtgcgagtctgcacttttattctcaagatacactgcctattatcatcgattatgggaagtttatttaatccgttcttagttgcgctgatacttggcttttagaagctttttttaagtggctaaaaccaacaaattttttgctttctcatcccatagtcggaactttaacgacttaagacttgttgccagtgtaatggttggaacgttttgcaatggttcaatgttgttatgcacttcttcaagcttatagtttgggactctcgggcttaaatgatgaacatgatggaaaccgatattgcctgttagccattgcatgacttttggaagcttataaaaagagcttccttcaactgctgcttttacatattcccaatgctcatcttcttcaaaataagaatcctcaaacgtatgctgaatataaaacatccaaattccgagagatcccgatatcataaaaattggcgcctgaaccagcaggaagttttgccagccaatagcccagcataaaagtgctgtcaaagcggcgattcccaagttcgttgcatacgtattcatccgttctttgcgttttgcccctttacgattaaaacgattggtaatcccgaagacgtaaatcggcccaatcataaacataacaaacggatttctgtataaacggtacattatttttgtcttagttgaggcttccttatattcttcaacggtcagcaaccaaatatcgcctgtacctcgtttgtccaggttgctgcttgtcgcatggtggatagaatggtcgcgtccccaatgatcaaaaggatgcaaagttagaattcctgtgattgttccaaggattcgattcgcctttttgttcttaaaaaaggaatagtggcagcaatcatgaaagatgatgaaggttctcactaaaaaacctgccgcaacgatagaaatcgctaatgtaaggaaataagaaatcgacaagctcttatatgctaaacaccataacaggaaaaatggtatcaatgtgttaatgatttggtaaatgcttttttgtaaatcggacttttcataaggtgtaactagttttctcaaagtctttagattttggtcattcatttttaaaagtttccccttccctgatgagtttctaagtttacgttagcccaagcgtcatacatcatataagtatcgttcttagccctctttattggaaactcgaaactgatttccagctcaattttatgaaaattatacccggctctttatcgggccaaactctctccctgcttccctatgggaattgtttttttttagaccgtgaacattgattgtttaactaacaaacatgatgaacaagaaacagcagagctttttaaagaaaatcaattttagcaaagaaaaaggtttgaagacactcgtgattcattttcacggtgttttcaaaccatagttcttagccctctaagacatgttgtaaattttatgcggaatgattgacgcctatcgcttctgcactgatatccacgcgtttaagaaataatgccatgaataaaacaataataggaattgcaattatttccgtttcctgttatgataaagaagaattatttttgttcggtgtaaaggatagtatgaatattgacttttcgtcttgatgatactttgggcaaggatagtaatacaatgtgcggtaacgcactaggaggcaacaaaaatggaacaaggtacagttaaatggtttaatgcagaaaaaggttttggatttatcgaacgtgaaaatggagacgatgtattcgtacacttttctgcaatccaaagcgacggattcaaatcattagacgaaggtcaaaaagtaacatttgacgttgagcaaggtcctcgcggagctcaagctgctaacgttcaaaaaactgcttaattttcaatcgtttatacaaacaggctctctatgtagagcctgtttttttatgttctctgtataatgcttaataaaaaaacctactcaacgttcgagtagggagatggtgcaaagcaataaaaagaagatttcaagcttaaaaggttgtttacagtataacatactggattgacaatatgcggaatgtatataaattatttatttttcttttcgaatacaactacttctcattctttctttttggttacatctccttcatgcaaagttcaacagtatttttccattcaaacccggctgttcataatgcttcaaggcatcataaaaatcttcaaaatcatatattttttctggggcattgatgaccattcttccgctctcaacaagcttaatcacctccgagaagcgattgcggtattcagaaacagaatgtctctcattccaaagtcttaaggcgaataattgcggtgacacatggtatacatcgtgtagctttcgccaatcgtttggtatacctgacaatagaccataactgacaaacgtcccttcaggttttaatgccctcgccagcagttcgccgctttctcctcccacagagtcaattgcatggtcaacaccgatgtcgcaaccatcagaaatcttttcatatatagaacctttggaagcgtcgatggctctccatgccccgagtttttgaagtttttctatcttgcggctgtttcttgtcatgacaattaaacggaatcccagtattttggaaatttgcgcaaacaaacctgcaatagatgtacctccgccattcattaaaacaatttcattcggctgaacacgcaatgattccgtacaaattagccaggctgttaatggattaatatacagttgactggcgtcgttatcacttattgatggaggcagttctatagcataatcagcttttgtggttacatattgttgccaagttccctctcctcttacagggaggaccctttttccaatcaatgatggtgatacatctttgccctgatctatgacaatccccacaccatcatatcctgcaacagccggcagcttaattctatgagaataggctcctctaattggaagcaaatctgatggattaattggactggcaatcattttgacaagaatttcatttggctgaagaggaagcttttctccggcatgtagctgtaatttttgaagcggatcaccgaattccttatatattaatgaaacattattcatgatttgttattggctccttaggttaatacttctataaataaagttgcacttatttgagattatgtcaatattgtctttcttttaatatattgaaggggggtatgaataaggaggaacaaaatagggaatttctcaactaaacttttaaaggcttggctcgcaatccccagatggttcagaatgtttacgctaagtgctatcacgatatatattttatggtcatttttctttaatgggataaaaaatatatttaggttagatacctctacattagttataagcttaatagcatccggaatcatattgatgattttcaataaaggttctgtgaaaaagtagggagcggcattaaaaacattccttatcgtcatgtacgagcgtctgtaaagcgacccaacacttttccagcaaacggcataaacaaatgaagggccagccctcctaaacaaacggttaataaagttccgatgccaatcggtccttttaacatgacggccgctgtcaagaagacaaggtaaatgatggttctcgaaaaaaatatattggttcctgttaattcttttatgatgaatgttagacggtcaattggcatcgaagcaaaatttgtgtataagtatgtcgcggttcctaatcctgtaacaaccaagccgatcccaaaacaaaccgctttgctgtaccattgttctggtgtcacaaaaaaatgcagcaaaaaaagccacatgtcaatgccgataccggttataaacgccgttagcagccccgaaacttccggtctttgtctttttaaaaacgaattgcagcctattaatagcagagcaatgatgacttcccaacttcccacagtaagccccgcatgtacggccagtcccaccaaaagtgcgtcaaaaggcgaagcgccgagatctgattgaatcgtgaaagcaataccaagggttaagattaaaattcctattacataaaaaagatatttcactttgactcgacctctttttgtttttttattgcaaatgcaacaatattccggtatatttaatgtacgctaattatattgcatttgcaacaaaaagctcgaaaggggtttatgatgaaggatattctgcgtgaaattggaatgattgcccgagcattggattctataagcaatatcgaatttaaagaacatgacctgacaaaagggcaatatttgtaccttgtccgaatatgcgaaaacccgggaatcattcaggagaagctggctgagatgattaaagtagacaggaccaccgcagcccgtgcaataaaaaaacttgaaatgaagggctttattgaacggagagatgatgaacataacaaaaaaataaaaaaactttttccgacggaaaagggaaatgaggtatttccttttataaaaagagaaaatgaccattcgaatcgtgtggcattagagggattttccgagggggaagcggagatcatcttcaatcttcttcaaagagtaagaaaaaatgtagaaaaggactgggaattcgtgaaaaaggggaacaagagaaattattgacacgtaaaggagcggcagattgaaatgacagtaaatataaaaaggtgtacccttgaagacttacacaagcttcaggaaattggttatgaaacatttaatgagacatttaagcatcagaattcgccagaaaatatgaaagcctacttggacaaggcatttaacttaaaacaattagaaaaagaattatccaatagctcttcgcaattcttttttgtttattttaacaacgaaatcgctggatatttaaaggtcaacaccgatgaggcccagtctgaaaaaatgggtgatgaatcacttgaaatcgagagaatttatatcaagaacaactttcaaaaacacggcctgggcaaatatctgttcaataaagctgtggaaattgcaaaggaactgaataaaaaagaaaatctggctgggcgtatgggaaaaaaacgaaaatgcgattgctttttataagaaaatggggtttgtacaaaccggcgcccactctttttatatgggagatgaagagcaaacggactttatcatggccaaaacaatcctataactttttaaaaggaggatgacgatgtatattccaaaatattttaaagtcgaaaatgctgatgaaattttggattttgtccaaaaaaactcttttggcacgattgttacgacagaacaagggaagccaatcgcgactcatttgcctttagggctcaataaaaaaggcgatgattactatatcactggccatatcgcttatggaaacccgcaggtgggaactttggaaacctgtaaagatgtgcttgtcatgtttcaggggccgcacgcatatatttcttcttcctggtatgggcatgaggatgttccaacatggaattatcaagccgtccatatatacggtaaagcaagcattctagagagagatgaattaatagaagaattaacaatcatgatggaaaaatacgagaagcatcgggaaaatccaattttatgggataacctttctcctcaacttttggagagacaactgaaagcgattgtcgggtttaagattaaggtggaagacattcaggctgcatataaattaagtcagaaccgaaatgatacagactacatgaacatcattgatcaattgcaaaatgaaggagatccagattcggagcaattggcagcagcgatgaaaaagaggctggaaaattagatataaatctaccttcaaccctttcgtataggaattaaaggtcggaatcagagcagtcatatttgcagcatcataaagagcgagaaatgaaaaggcaggccgaatgatttgcttttttttatgtcgtgtagagttgtttattgtgaaaagggcgaataaactttgtcgaggacctaatggggagggggacaaccccgcggaagttcaagttgtctcgaccgcatcataggaataccaagggttgataagcccttggtatttctttcttccacttgattctagtgagcaacatgtgaagggcaaaaatcatgtaacatgacaaggcgatggaaagctatctctattattatggagagtttcgactctattattttgttgtcatcccgtttaaaaaattattgggttaaaatagggatttcactaagcaatttcttcaaatgaatagaatcccacggcaaatgctcggttatacctaatccaaccacatccgtttcggaagagagttctttcagaagatgaagcaggtacggcatttgcattgttccctcaggagaaaaatttacaggtgcttcaggattggcgaataataaagaacgaaacgccttcggatcaagcacgtctaaatcaaggtgtattgccagatacttgatgttgctttcttttatccattcttttataggttcggtactggtcattaactttttagttccggcagttctaatcccaagtctttgaatcacttcagtgtctggttctgtgggagctataccttgtctttgaagttcatttgatatcacttttgtttcttcttctgtaggagctgctaatcccgcaataaagacattttcaggtttcaggggaattttcacatgttttgcgaactcttcatctccttctcccaaaagattcccgagcggtaatgtatgaccgttgtcataaccggcatatctaactaaatcgctatgagcgtcaatccaaattaaacctaagtccccgccgtatcgttcgtttaaataagcaaatggtgcttgttcgactaagcagtcaccgccaaacatgacaatgcgatccggcttatgagcatgaatgatatgctgagcagcctccaattgttccagcagttgttttctcccgtttatcccgttttcgttttcaagcggagttccatcataaggttgaaccggaacatgaataaggggctgatcattttcaggagccagccaagcaagcagttctgctccaaaagagtagttgggattgtttcccccttgccattgcggcattaacagacgaattgtttttttagccatgttttagtctcctttacttcaaagtaaggttagtataaaatgaacgcaaataaaaaaatagtacgcactttaatgacaggtactatccaaaaggagagtgtaaaaatgagtatggcagaatataaaggtaaagtgaaaaatattcaagatacaccttttggatacacattgtctgttatcggcggtaaatggaaaatggttattatttacctcctggcagaaaatcaaccaattcgcttcaatgagttgaaaagacaaataggggctattacttataaaacattgagttcacaacttaaagaattggaagcggatggactggtgaaacggaaagagtaccctcaagttccccctaaggtcgagtacagtctcacggataaagcggaatccctattgccggttttagaagggttatgtgaattgggtttaaaaaaccaataaagttaaggtttcattcttactggagagggaagaatcaaaaagcttcgttctattgccaacaatccttttgtttgtctggaaatgtcaatatacattaactgcagaacgatgtgtcggttgcttcttaagagagggcctttagtgttgctaaaactgggtgcttgcaatatagctttgtcggcacatgaatgttccaagtctaaaagggttaccttaattcaagtaaagagcggtattcgcggcagcctgcttaccatgatacgtgattgaactttttaacagaataaatttattatggtatatttaaatataacgtaaaaattgaaatgaggaatggcatgaataaaatcgaaaaacataggaaatttagagcgaagatgattttcaaagtcataatggtcatgatcggaggaatcatagcggcatatggattggaaacagtgctgattccaaacagtgtatctgatggcggagtgacaggacttagcattgttggttcacaactgtttgatttgccgcttgggattcttatcgcggttttaaacataccgtttgtctggctgggatataagcaaatcgggaaaagctttgcgctattgtccattatcggaatcgcatcacttgcagcagggacaagttttatgcaccacactccagctataatcgaaggggataccttgctagtcactgttgtcggggggatcatccttggatttggaatggggctggcgctccgcaatggcggagcattggacggaattgatatgcttgctgttttgttatcgcgaaaattgccatttggaacgagcgatcttattctattctttaacctttttgtgtttatttttgtttccgctgtatttggcttgcagggggcattgctgtcagtcattgcctactacatcgcgtccaaagtcattcatgttgtcgaggaagggttaagcggatctaaaacttttcaaatcattacaagcgaacctgaattaatggttgagacaattcgtgatcaattgggccgaagtgctacatataaagaagcttacgggggtttttcccacgagaaatttaaagaaatcacctgtgtcatcaaccgcttagaagacaccaaattaaaagaaatcattaatgaagttgataaaaatgcttttgttactgtatatgacgtagctgaagttaagggcagtaattttagaaaacctaatattcattagcaaaaatttttgagggccttcctaagaaaaaacataccacgtcttgttggtatgttttttttgtccttcgaagcgatttccaataaattgatgatcagtcatcggaaaatagacaccgcagaatacatgagcagcaggcacataaggactcgaaatacccggtcgtgctttgcaaatacccttttaaaaacggagccgaatcccgaccataatagcagcgccagccacccgagaacaatggctaatgccaaataatagattgtcgatttcaaggaatggttgaacggcaaaacgaacgcgctcattacggttaagaagaacaaaatgcttttaatattgatcagctgaaatataaagccggatataaaagaggagcgggcttctgtggaatcctgttttttatttttggtaaagccgacttgcaaagccaaataaatcaaataacacgcgccggcaagtttaaaataaggctctacaacgggaatccaattgtacaggctgattgtaaaggcaccgctgagaatcccaagtactgcaaaccccgccaagataccgctgctaaaacgccatgaacctgtaaagccgaacctttgcgcttcattcatcattaaaatattgctcgggccgggcgtaatggatgtcataattacatacgaaagaaaagctataatactcatttaatcaccttcatttgctaatgtcatagtgggcagtttttattgtatgataatgataactataaataaaattgaaatatcaaaatgcattattgattttttcgatagatcaagtgttaaggagacatcgaatggaaatcagacatttaatcacgtttcagaccatcgttgaaatgggaagttatacgggggcggcttcgaaattaggctatactcaatccacgatcaccactcatatccaggctcttgagcatgagatcggcggggctttatttacgtatgaaaaaaggaatttaaaactgactcagttaggaagggagttaatgcctttagccgaagaattgctgtcaacccataatcagatcaagaatttgcagagcgctcacgaagtgaagggggtattgaaagtggctgcgcccgagtctttaaccatttctaggctggggccaataataagggagtattcgttgaaatatcctcatgtcaaattgaaactgagcaacggtacatgcggacaaaaccaagtcgacttattaagcgggaatgtggatgtcgctttaatggtttatcccgaaatcgagctggacaaatgcattcgctacacgttggctgaggagaagatcgtccttgtcggcagcagtgaagggcctgaggatttagaagaatatcaaaaacatttttttataacgaatgaagaagactgcagctatcgaaccatgtttgaaaaatatctcttgaaaaacgatattcattactttccaacgatggagttgtggagcatcgaagcaataaaacaaacggtcatgagcggactcggattttctgttttgccttacattacggtgaaagacgaagtggaaagcggtaaactgaaaatccttcctcattctcaatacctcgacccgctttattcccagatgcttatcaaaaagaaaaagtggcagctgcctgctgtggatgcttttgcggatctggtattgcattcgtttcgtgaacctcgattaataggataaaatgaatagtgaaagattcacttgaattccttattttgtagattagatgtgctatgatacaaaaaaagggcgggaatacttttgcgcgaatttgcacctaaagtttttcaaacgacagggattattggttttattttagcttttgtccaaattccaatcggctggtttatcggatttttcttttccggtttgttcttcatgatgttgaaatcaaacaatgaaaaatcgggaaccttcaacatgatggctgggattgcgtgtttattgtattcattctattgtttgtttacgcaagtgttgtgattgatattataaagaaaaaaataaaaagcaggtggatgtcacatttataatcatgagttttaaatacggagcgtgatgaaatgaaagaaaacagccttttccattctgtaccccaaaatctatttgtcttttatctaattccatcgtgtgcatttggaaaccaaaatgggtgatttgtaattgcgaaagttgaaactgttgcttgccgctaatttgatttccaccgtaggtaccggcatcacttcctatttgattgtctggctgctgattgatcaattgaaacaatccgttttatatgggttattgacgatggcaacgatgattttagtgttttttgcctcaccctatttagggagtttggtggatcgatattctcgaaaagcgacattcctctatctggaaattacaggaatagtggtcttgggcgttttttctgttctatgcaatgtttccgccgagttggacatcacccttgttgtgatgctgattttttatcatacagcttacgattcgataaagtatcctgctttagccgctttaactcaggaaatgttcaaaaaagaggactatagtaaagtgaacagcagtcttgaagttcaggggcaggcggcgctgatgattagttcggggctggctgccatgatgatcggcaagatggatgcggcagttattttggttatgaacatctctacatttatagcagcttccatcctcatctaccaacttccttatcaacgaaatgctgaagcggaagagcattccaatacaatgaaaaatgaatcttactggaaaaacttcagatcctcactccaatatttatgttatcgaaaagttttgtttgttcttttattgacttcttttataccaagcatcgtgattattgtcgcaaactacttggatccggttttcatttacgactatttaaacgaaggtccgtcagttatcggcattgccaatattgtttacgccattggagctatgggtgcgggctttgtcgcatatcaaatatcaaagaaatggtctgatatgcaaggtgttatattgtttatggcagtatttgctctagcaacaattgcgatcttcttcgttccgaatgacatttatagtggcaagcctcttttgggggcattcaaatgctgcgatcagagtatttagaaaaagctatatgttccatcatgtcgataatgcatatatgggacgtgtcaattcgttgtttaatgcggtaaagctgttgggacaagttgctttaataggcatcttgacgattacagtagtgccggcgggtcaaactgtttacggatacttcgttttattcatcattgtaattgctgctcttttaacaacaacttatttatttaacagaacttataacaaagataaagaaaagcgggtatctttatagagtagcttcccccgtagaggaggcataaaaaagcattgctgtttaaatacgatacttttttatgccaagggagcccccgcgatgatccctaggcttcattcaccgctaagaattgcaaccggacgcgcccagccggccgacgctttttcaacttttacgggaaaagccatgacataaaatccggtggaaggcaattgatccaggttggcgagcttttcaatttggcagtaaggaatggtgcttcctgaataatgaccttcccaaataatcgacgggtctttttcctgttcaaagcgcttggcggtcatgctgaatggagcgtcccagctccaagcgtcagttccgacaaggcgcacgccccgttccgttaaaaaaagcgttgcttcgcgccccatcccgcagccgctgtccaggtaatcgctttgcccgtatttggcaccggccgacgtattcacaagaacaatatccccgggcgcgagtttatgattgatgcggtgaagttcttgttcgatttcttcaggggttacgatatgcccgtctttcagatgtctgaaatccagcttaacgccggggccatgaaaccagtcaagcggaacttcgtcaatcgtcatcatccgcttgccgtcatcagtaacagaacggtaatggtatggagcgtctatatgcgttccggcatgcgttgacattttcactttttccagcgaccagccttctcccccgggaagatcttgcgaagagaggccgggaaagctctggaccatctgtttggctccttgcttatgatccgcatattcgatttcatggataaaccccggcgggtcagacggaatatcgcctcttagcgataccgacaaatctacaatttgattgattttcatctgttttcccctttctgcctaagcggctgaccattgaattgatgtgcggctgttgtctttttaattttacagcaagagccatacaaaaagcccgcagaactttctgcaggcgattcgcattttttctacacttgccgtgacttaggttttctcagcttgtaaatcgcgatcagcatgataaaccaaaccggcgtgacaaataaggaaacacgggtgtcctgcgccagtgcgagcacaatgaggataaacgcaagaaaaccgagaaccacataatttgaaaacgggtaaagcggcatcttgaatttgtttcttttcgctaaatccggtctagttctgcggtatttcaaatggcagatgacggttattccccaaataaagatgaagcatatcgtcgagatgcttgtaatgagcgtaaacacttgctcaggcatgatatagttcagcatgatgccaatcagaataacgaccgctgagaaaaacaatgcattgctcggcactttgcgggaggtcagtttggtcatagcgccgggcgcattatgttctttcgcgagcgagtatatcatccggcttgtgctgaagactgcgctgttgcttgccgaagccgccgatgtcagcaccacaaagttgatgatgcttgcagccgcaatgatgccgaccgctgcgaagacttggacgaacggactctcattaggattgatgacattccacggatagatgctcatgattacaaggagcgcaccgatataaaaaagcaaaacccgaacggggatattgttgatcgctttaggaatgaccttttcgggatctttcgtttcccccgctgtcagccccacaagttcgatgcctacaaacgcaaagacaaccatctggaatgaaaggagaaatccgtgcagtccattaggaaacatgccgccgtggctccaaaggttgtgaaaggcggcagtgcccgaatgggtagaaaatcctttgaagatcatgaaaagtccgatcgcgatcagcgccaatatcgcaatgactttgattaacgcgaaccagaactccaattctccaaaaagcttgacggtggccaggttcatgatcagcaaaatgatcagggcgatcaatccgggcagccattgcggtacatcaggcagccagtattgggtataaagcccgaccgcggttaaatcggccattgcgagcgaaatccagcaaaaccagtatgtccaccccgttataaatgccgccatgtcgcctaagtagtctcttacaaagtcgacaaacgaatggtattccaaattggataagagcagttctccaagagaacgcataatgaaaaaacaaatgattcccgtaatcagataagcaaataaaatcgacggtcctgcaaaatggattgatttccccgaaccaagaaacagccccgttccgatcgccccgccgatggcgatgagctgaatatgcctgtttttcaggcctctcgataatttttgttcgtgtatatcgttgtcagttacatcttctgtcactttatgtatgcctccattttttgtttttaagcctgatctcccgcatgttttaaaatctattataacattaaaatttgaagtaattgatcatatcggcttgtgggatagagttcatctgttatcgtcgataacacttcaagcagagacatcattcaaaagtatgccgcaaaagatgacagagttataccggtttcccaggaaaactcagatccgaacaaagggaagaaacagtacacggcttgtttttaatggttttgtcattgagaggtcctaaaacgccaagctgctgcgctcgtccgctttcgtgatacaatataagcacctgagagagcatgatgttttaggagggacaaaagctgaacaaaaataaatttaaacgcagtcaatcggttttttcggcaatgctgatcctaatcgcggtgtatgttctgtatacattgtttgaaaatttaattcttgatccgcaatcaacgtcctttctgagccataaatctcacctccgagactcctttcacctcccgatctggctaaaggtgatgtatgttcatgtcattgccgcttgtttggcgatggtttcgggagctgtcaacttctccagcggcttgttggccaaaagccgcaaaatccaccggcttaacggctttatttacgtcgtctcggtgatggtagttacgctatcatcaggctatatggcaccccattctacgggaggtagagccgtcagcatagcctttaacatggtgaacatgtattggccggcggccactgttatttccgtcatcaaagcacggcgaaatcagtttacaaagcatcggaattggatgattcgcagctatctattctgttttaccaatctgtttattcatttcatcacgtttgtgtgccgaagcggattcggtttgccatacgatatcagctacacgataggcgtttacggggcgattgcactgaacgtggcggcagctgagtgcgtcattcattttacacgcagaaaagcggtggacattttgcatacagctggattcgataaggtatagataattcgctgtgccaagggtatttgagcccttggcattctgtttttttagctcttacaaacaagtacagggctataactgttgcggcaggaacccatttttctcttgatctcttatttttatgtaagtttaagctgggtttaaggtcagtcatgtaaactttgaaggataccgtatatggaggaatagaagcatggatgacagaattgaaacaaaagagccgatgccttcattaatcggcttgatcacgaacccggcattgcagtttgaaagaatgaaaaggcggccggcggttgctctgccgatgtttattgtattcgttttatcggttttatctgcttatctttatatttcaaaagattttcccgatacgtatacctactttggaatgatcatatttttatgggagtttttaaagacggggatctatttgtttgtatcagctttaatattatggctgatcgcgacaatagggggcggaaaaacaaactttgtgacgatgttttcgttggcgtcttttgtaggctttgccaaaatcattggcgacgtgataaacaatacagtttatcgttttgcgaatgtgccggaagggacttcgtttacatctttgcacgatgttttttcggccgtcgagccttataaaagcatattgggcgtgtttgatatctttatggtttgggcgcttgtgttagcggctgaaggtcttcagaaagcgggtggagcttcgaaacgggcttcatggatcgccgttgcagttttatttattctcaagtttttgttcgcttgtttttttggtttgtttgccgcattgtttgaggatattttttagaatttcgattcggattatttcaatatacaaaatcagtttctcgcgaggtttatatcggtgttttttttctctatccgctaaaagggagcaagggctacgaagcaaacctttatatatggtttgctctttttttgtttctcatcattgatttgcgcaaaccggcattctggcgactcaatttccttcgcctccctttccggtatttttcagggtagaataaatgaagtgatgttttcttttaaaaaaacacgtctttccgcaaactatttttcgcactcccgcgtctatcctaatgtaacagccgtatatacgtatattcgaaaaaggagttctttattgcaatgaagaaacaagcagccagagcgtctcttgtcgcttgcataacagaccggaaagaagacttttaccggctggcatacagctatgtgaaaaatcaagaagacgccttagatattgtccaggaatcaatcaaaaaagcgctcgattccgtcgattccgttcgcaatccggatacgatcaaaagctggttttataaaattttggtgcggacggcaatcgattttttgcgcaaacagaaaaaactaaaggttatggatgatcaaacgattgagtttttaagccagggcaaggaagatacctaccgggatacagatctccatgaggcgcttgatgagttgccgcaaccctaccataccattattgttctgcggtttttcgaggatctcaaactggaagagatagcggaaatcacaggcgaaaacttgaatacgatcaaaacgcgcctttacagaggattgaagcttatgcgcatccaattgacgaaggaggatctttcttaatggataagaaattggaacagctgagaaaagcatatcaaaacgtccccattccgaaggagctggatcaggttgtcgagactgcgcttcagcataaaccgaagaagaagagaaggatagtggtatggcccgcatcaacgctggtcgcggcggctgtactattggctgccgtcgtgaatatcaatcccggagcagcgcaggccatgtcgcagatacctgtcatcggcaaggtcgttaaagccatcacattcaccgagatcaaacagaaagatggagaatcgagcattgacgtgaaaacaccggctctttccggcttgaataaccgggagctcgaaaatggcatcaacgagaaatatgtaaaggaaagccatcagctttaccgggaattcatgaaggagacgtcccggaataaaaaagggcatctcagcatctacagcgattatgagacagtcacggatacgaaagatttgatttcgattcggcgaagcgtcgaaagaacggaagcgtccagctataccgaacggcgctatatcaccattgacaaaaagaatgaagtcctgctcaccttgaaaagcttgtttaaagacgaccggtatatcaccgccatcagcgaaaacattaaagagcaaatgaaacagcaaatgaaagatgatcctgataaaatatattggatcggtgacgaagaagtcgagccattcaaacgaatcaaggccgaccaaaatttttacattacagagaatcataaactggtgatttcgtttgatgattatgaagtcgctcccggctatatgggcgcggtggagtttgaaattccgactaaggcgatttcgaacctgctgatcggcgaccgctatatccgctagtgaaagaaatccatgattcgctgaaatcatggatcactgatttcttatttttttacaactttgtaacaacatattctgcaggaaactcttatactagagagacggcattactcagggaagataaaaatggacgattttttgaacaaaaaaccgtcctgacttcgtctatatatcggagccgtaaaaggcacgaaacatacagaagaatcgtacgtacatatcattggaggaataccatgcgagatcagacacaacaacaccgttacataccggggttagacggccttcgggctttgtccgttttggcggttatcgcttaccacctcaacatgagctgggccgacggaggcttcattggggttgatatcttttttgttttatcaggatatttgattacatcgattatcctgccggcgtatggaaatgacatttccctcacattccgcgatttttgggtgcgccggatacggcggctgcttccagcggcgacgctcatgattttcgcaaccgtcatatgggtcgctttgtttaacagagagctgatgcataccgtacggggagatgcgatctcctctcttttgtatgtcagcaattggtggtttatctttcacgacctgtcatattttgatagttttggatcgccgtctcctttaaaaaacttgtggtcactggcgattgaagaacagttttattttatctggccgatcattttgctgttgggcatctacatatttaaaaagcgggagaggtttgcagcggcggttgtgctgtgtgcgctttgttcagccatatggatgagcatcctgtacgtcccgggcggcgatccgagccgtgtatattacgggacggatacacgcgctttcgagctgttgatcggatgcgcattagcccttgtgtggccgatgaaaaggctgtctgggaacaggctccccaacagcctcaagcatgcattgcacggaactgagcttgccgctttcgcgctgcttatgatgtgcatttattttgtcgatgaattcagcccgtttctctatcacggcggaatgcttataatcagcataatcgcagctattttgattgcatgcgtcagtcatccgagcagcttcctgggctttgccctttccgtgaagccgctgcgctggatcgggaaaaggtcgtacggcatttatctttggcactatcccgttatcgtgctgagcacgcctgttcaggagattggaaatccggtgtactggcatgttgcgatgaaggtcgccgttacatttattctggcggaactttcgtatcgctttattgagaagccgatccgaaaagacggttttaaaccgtttgtcagccgggtttttctggataagatcacggaatggaaaacggcttccgttccaagcaaaatatcaatcggcctgatgtttgccgcgctcctcgtttttgcagggggtctgtcgggattggccgacgaaaagaaacagccgcagcaggcctattcaaaatcttatgaggaaacaagcgcctcagcggatcagccggctgacaaaagtgaagaacggcaggacgataagaaagcacaaactgagagcggaaatgagagtaaaaccggaaacggggaggaatcgtcagatacgaaagatgagcagtctgcggaaaaagagccggatcgcatcgaaaaagaagtattggctgtcggggattcggtcatgctggacatcgcttcaagcctgcgccggaagattccgggaatcacaatcgacggacaggttggaaggcaagtgagggaagcgcttcaattgacatcaacctacgcctcctttaatcatccggacaaagccgtcgtcattgaattgggaacaaacggctattttacggacggccaattggacgctttgcttgatgctttctcaaaagcggatgtctatctcgtgaatacgcgcgtcccccgacaatgggagagcaaggtgaatgaatcgcttcggaagcatgcggacagccgtcaaaatgtgacattggtcgattggcacgctgaagcactgcaacatcccgaatatttcaccgccgacggcgtccacctgatgccgaaaggtgctgaagccttggcatcgcttatcgtcaaagcgatgaaataatctataaaaagaggctctcctttaaggaggcctttttttatggcaataaagtcaattgggtgcatttatttttcatgcaaccgcctttcactgttcaaaaaatatggtacaatatacaaatgttttgcagcctgtaacaatagaaacagagatgttaactaggttgatagaaaggttttgatgtttttatgcttcataatccagttggtaaagagaggttggcattggcttttctgctcggaatgcttgccatacttggacctcttaatatcgatatgtatttgccgagcttccctgaaatagcggatgacctgggagccggtgcgtcgcttgtgcagctcagcttaacggcttgcttgatcggccttaccatcggccagctcgtgattgggcctgtgagcgatgcgaagggaaggcgaaaacctttattaatttcgatttcgctgtttgcgctgtcttcactgttttgcgcgctgtcgcctaatatcgcgacattagtgcttgcccgttttttacagggatttaccgcttcggctggaattgtgctgtcgcgcgccattgtacgggacgtgtttacagggagagagctttctaaatttttctcgcttctaatggttatcaccgcggttgcgccgatggtcgcgccgatgacggggggagccatcctgcttttgccgttcgctacttggcatacgattttttatacgctggcattgatcggattgttactagtactcgttatctcgatgaaattgactgaaacattgccgcccgaaaaacggattccaagctcaatcggttcgtctctcaaaacgatggggagcttgttgaaggatcggtcttttatcggctatgcgctgactgtcggtttcattcacggaggcagctttgcctacgtatccggaacgccttttgtatatcaggatatctatggggtttctcctcaggtgttcagcgtgctgttcggcattaacggcctcgccattatttcgggaagctttatcatcgggcgattcgggggaatcattcatgagaggaagctcttgcggatcgcggtcattaccgctgtcatcgcgacatccgttctcctgacgatgacgattttgaaaggaccgcttgcagcgattgtcatttcaatctttatctacatgataaccatcggaatgacgttgacaagcacatttacgctggcgatggaaaaccaggggcaccgtgcgggcagtgcaagcgcaatgctgggcatgcttccgctgctgctcggttcgatcgtttcgcctctcgttggaatgaatgaaacaacggccgttccaatgggtgcgatcatgttcatcactgctgtgatcggctctttcgctttttttgctttaacgcgggaaaaccagggggagcggtaaaggtaaaggacggaatcacttgattccgtccttttgttgttatagaggcgcccgctggatggcggagtctgagacgtccgcggattcattgatagaaatgaccattgagacagcggtcccgctatcaggcgtactttcgatattcagttcacttccgcagaagtgtttcagcctgcggttgatatttttcataccgacactatgagtgaaatgagaagaaaagatatcttgttgtttctccggcggcatgccgattccgttgtcctctatcttgatataatagcggttttcgctttctttttttgccgtcagcttgatccagcctccgcctcttttcttgctgatgccatggtggacggcattctcgacaagaggctgaatcattaaaggcggaagggtaaagtcgatgtcttcctcaatatcgtaaatgacgtccagccgatcgccgaagcgcgttttttcaatggaaagatacgaattcacaatcgacagttcatgcttgaaagaactcatccctgatgtattttgaaagtcaaaactcattctcaagtagtttgtaaaatcagccgtcacttcgcgcgccttttcaatatccaaatgactgagcgcgataatggtatttaatacattgaaaagaaagtgcggcttgatctgcgattggaggaatgccatctccatatttgtcgcttgggctgccgtatctttcatcatgatcaggtttttaacgcgggctgcaaattcagtgtagttgtacggtttctgcaaaatgtcatttgccccagcgtgaaaagccttgtatttatcatggtcgatgatggctgccgtaatgatcagaaccggaagttccaccattgtgaacctttcgcggattttcatgcagacttcaaaccctgtcatatccggcatcatcaggtccaaaatcaccaagtcaagctttgaacgggagacgacttcgagagcctcatggccgctttttgctgcgatgacttgataaggaacgccttcaagcatatcggccaaaatttttaagctttcgatgttatcatcgacgatcaaaacagttgaagcatccattttctttgagtagtacggcgtgctgatagaaacatcgggcagatctctgacggcttgctgttgaggcatgttctccttcttcgcgtcaggaagagggtcattttttgcaacaggcagtgtgaaatgaaatgccgatcctttcccttcttccgattctacccagatctctccattttgaagctgaacgagctgtctgacgatgcttaaaccaagcccggctccgtcgtctttatggttttttgcttgttgaaaagcttcgaatatcaattgacgcacggcttttggtatgccgactcctgtatctgctactgtaattttgaccttctcttggtcgagcctttcggcggagagcgtaatctgcccctccggcgtatacttgatcgcgttatcaaccaggttggtcatgatttgccggaagcggttttcgtcggccaagacgagcggcagtccggatggaacacggtttacaatccggacatttttattttttgacaacagccgatagaagtccatttccgtgcttcgccgaatgggcatcgacaggaacggcctgaatctgcagcatgccctgcttcattttttccaaatcgagaatgtcgttcaccagactggatagtctgtatcccatgcggatgaccagctgcagattttctttttcttcctctaacgtcctttttctcttccttgccaaaagggtctggcatatattaatcatgctgttcagcggcgttttaaattcatgtgatgttttggcgataaactcgtcttttaatcgattcattctgagcaatttcaaggacaggatttcgttctcgcggaatgcgcctgcgaattgctgcgccatcatcagtacagccgccagcaaagcgatgatcgacggcacggcatagagcgaattgaatgaaaagcctcttttgccgctgtaagcagaaacggtcgttaaaatgacgaatgcgctcatcgagatcgctgcaatcgtaagataaaggctgcctttcattttccgaacagcagaaatcgcaaacacatacgtaatataaatcaaagtcgtgacggcaagaacagagtgcaatatatatgcgagacggtctgtgtaaccccaggtaataaaatcaatcatcaaaaccagtacagaaaatgcagtcgcggcgattatccattttttcgaaacgatttctttgtaagcgaaatatagatagagaaaaaccgccatactgacaagcaccattgtggtcgccctcacgacgcttaaagctgagaatgagatagacggaaagagaagaaagatcattcgttctcttccgattaaaagcactatgaccgaaaaaagaagacacatcgtggaaaaaaagaataagtgcttatcctttcttcgatgcagaaaaaagccgagaaagtataaaccggtaataaagaatgctgtgatcatgctggtttcatttaaaaaagagattttgctttggtgtaaaatgtgctgctgcatcccaaaggcaatcggtttttctatcccccatgaaggtgtttttttgaagttcgaaaattgtacaatcaactcgttgtctccgcggcgaacctcgaaaaaactcgtataaggcttgttttgcgccgtgaaattcgctttgtttgaaggggttccgctctgcccgatcaatttgccgtagaaataaactcggtttgcgctgtttataaaagaggtgctgattccgaacatctcattgtcttgctttgaccggatcatcagtctgtatgtaccgtaatccacgttttttcctgaatcggtaagtttgacattgttaggcacatcggaataaatgggggcttttcctttgcctgcatgaatgtcctttggggagagaagctggtttcggtatagtgcccattctccggtgagcgcgatgttcccgtctttctgaaaatcccatgtttccagattgatgattccttgcttcgcttcagggtagttttgttcggacaattggttgttaatgaataagaaaataaaaaagaagccggcatagccgagaataatcgaaatgaaaacaaatagctttttcaacatgagcactcctcattccacctgctgcagtcttgtcgaatcttatgaatattgtactcttaaatgttaataaacgacaagattaagaaaatgaatccaactaaataggtccgtagacatgatataatcattatcataatttccagatgattcgatgaaaaatggggtgggtgtgtcgtgaaagcgttaattgtggatgacgaggaactggcattgcttcattttaaaaatatgcttgaacgaacaaattgctttcgattcattgaaatgtttcaagatccggctgatgttctggaatatccggatattcgggatatagacacggtgtttcttgacattgaaatgccggggataaacgggattgagctcgctgaagcgattcccgatgaatgaaaacattcaggttgtttttatcacggcttataacgattttgccataaaagcgtttgaattaaatgcggtggattatttgcttaaacccgtcgattacgtccggctcgtgaagacggttgaacggatcagggaaaacagcttgctaaaggcttcagcggtaaatgccggaggggactatttcatccaatgttttgggaatttgcaattttacaaagcagagaagggcgtcaaaacatatatacctgttaagtggagaacatccaaggcccgtgaaatttacgcgtatttgcttcatcatcacggccatgtgatcagcaaagacgtgctgatcgacctgttctggcaggatcatgatgtctctaaagcaagcactcagctatattcagcgatttatcaaatcaggaaattaatcgataggcttcctttcggtcaatccatcgagaagactgacacaggatatgtcctccggatttccggtgtgaaagtggatgctgacgaatgggaaaagtcgctgaaagaggctcctcccatccatatggcgacgatcaacaggcacatggaattgctgcttgcatacgaaaaccattactttatggaacacggttatttgtgggccgaacccgaaaagacgcggcttgcccggatctggcttggaaaagcttatgaactggtcgattttcttattcatgaaaaagactaccgccgggggcttgatatatgtctgctggtcgagaaaatcgaaccgtgcgatcataaaatcatccaatacaagatgcagctgtttaataaaaccgggaatgtagaagaagcgatcaaggaatatgagcgctataaacttatgaaggacaaaatgaattaaaggtaaacgcgagaccggatcagccggtctttttttatgccattttcagcttacatttcgatgttcagaaattgtatagttccatcccatacaatgtagtttggttcggatgatgtcagctgacataaagcaaaattcatacccgcgacatcttgactaccgccgctaaacatacagcaacgattttaaaagcctgtcattctgcaaatagaaaaaaattttcaggagggaggccgtccatttccaggctcaatcgatccgtacacaaaaacattataaaaggggaggaatcacaatttgagatcgaaaaaatattcgttcagcctcagcaaaaaaagagggctgaaatcatttttggtcacttgcctggcattgtatttgatcttcagtcaagttgtcggctttacgctgacggcagtggctgccggcacatcaacaggcggcagcgtgttttttgattcagtgacaatcaaaaacagcgaagatcaaacggttgacggctcaaagggagacgaaccagcattaaagccgggagacaaagtgacactcacatacgagtggtcgttaaaaaacgatgaagaagccggcgccgaaaacagtttcactgtagaggtacctaaaagcttcgaattcgctcaggattccgagggagaagtgaaatcggcagatcagcagatcatcggcagctatcaagtgaaagcggacagcaacatttttaccgtaactctaaaaagccctgccgagggctctgccggagcaaaaggggccattgcgctgtcagcaaagtttgccgcagatgtgaaaggcgatacaaaaacggtcacagctctctttcaactcggagcaggcaagacacagcaagtgatcatacccgtgaatacaggctccgaatcggaaacggcgaaaaatgatcctccgtcatctgaggacgatcagtcagacgatcaatcaaaatcttcaggaggacaggaccaagaggaaacgaagaaaaaagctgccgacgctgagaacagcgattcaaaaccggcggcatcttccagactggcggcagccggaagccttgcgtccggtggcaatcaaatcacccaaaataatttaaccggcgtgacgctgacggatgagcacggaaagccttatgacaaaagcaatcgagccgacacgaattctccggcgaaaatctcaattacttgggacatcccaaatgagctcggaaagacgataaacgacggcgaccgctatgaatttgatctgcctgaagcttttatcatgtacaacgacattacgaatcagccattaagctcagacggcatcacgtacggctatttttcaattgatacaaaaggccacgttgtgatgacgtttaacggcgaagtgaaagaagattcgaatgtcaaagggacgttgtttgtcaacacccagttcaacgcacaaaaaataaaaggctcgacgactcaaaagattccttttccggtgaaatcagacactccagaagtaacggtttatttcaaaccaaaagtaagcaaaaccattgataaatcaggaactttcgataaaggcatcaaccccgggcaggtcacatggacagtcgacctcaacaaaaaattggatcaggtgaaaaatgccaagctgaccgagaactttccagaggggctgacctatcgttctgtcaaagtttatcagctggatgtcaacatagatggttcagtcagccagggagatgaagttctttcaggctacaccgtagacgcagatggaaatgtcacattcgacggtgagatagattcggcttaccgcctcatctatgtgacggacatcgatgactccgcaaaaccgaacgaaggcggaaacgctgcatttacgaacaaggcaacgttcggcggagacaatctggaaccggcttctgcagaggcctctgtcacggccaaatacgggaaaatgatcgaaaaatcgtcgacaggttataaaagcgattcacagacgttcagctggacgattttatataactatggagagaaaaaaatcgacgaatccaaagcgagcataacagactcgtttggttccgctgatttgcatcttgtttcagattccttaaaggtgattccgattactttcaatcagaacggcagtgagcaggctggaacgcctctaacggaaggcaaggattatacgctctctgataatggaagcgggtttgaaatcaaatttaaccaagatgttaccggagcttacaaaatcacgtatcaaaccgaggtcaacagcggagtaatcatcgataaatcaacaacctatacgaacactgcagtgaccggaacaggagaatcaaagaaagcttcaggtacagccgttcagcagaatttgataaaaggctactcaaacattgattacaagaagaaaacggtcgattggacgatcgcaatcaacaaaaacaactacacgatgaacaattggaagttggatgacaatttcgaaagcggcgggctcacgctcctcgacggatcattccgccttcaggatgtgacgaataacaaaacgcttgaagaaggcaaagactatacattgataataaaaccggatcatgaaggttttctcctggaactcatcggagattatgcgacaacgaacagccagcttaagatcacgtataccacgaatatgaatgccgacttttccaacgaaaatgtcaaaaacacggcagaatcaacgtggactgatcacagcagcactgaacgcaaaaataaggaagcgagcagttttacgccgaatcgccagacatcccacaacggcttcaaacacggcttatacaacgctgtttcaaaagaaatcacgtggaaaatcggcatcaactataatggagagccgtcggctgccaataaacaaactttgaccgtccatttgaaaacggacgattccgtcccgtatcttattgaatttaaaacatcgctaaaaggacaggtcattaagcacgatccttacaccaataaggccacgtaccataatgccggatattcagagcgtgagttgacggcatccgtttcggtcgcagacggaggaagcctcgttttcaaaggaggcaaacaaaacggaggttatgtcgattggagcatcaatgtcaacgcgagccagtcggtattggaggatgtaaaagtcaccgatactccggataccaaccaaattttagctgaagattcttttaaagtttatcaagctaaatacgatgaaaaaggtgcagtcaaagacagcggaggaaatcttgtcccggatgatgttcagcttaagaaaggcgaggactatacactggatatcaagaccgacaatgcaaccggcgaacaatcatttgtcctgaaatttacaggcgattacaaaaaaatcgaccgcgcctatgtgattcaataccaatcattaatcaatattgccggcacgagcggccatgttcacaacaaagtgtcgatttcgggaacgaatgtccaggaacagacccaggaaaacaacagctcggtctttgttgccgtttcaagcggcggcggttcaggctcaggggaaagaggaagcctgacaatccttaaaacgggagaagacgggacgccgctttccggagcagattttcaattgcggacaaaagataatgagcagctcctgcggacaggaacgactgacgacaacggcaagctgacattcggcaatattcgctatggcacttacattttaaaagaaatcaaggcgcctgacggatatacgatcagcgacgcctatgcagacggggtctccgttgagattaacagcagctcttcaagtgccggagcgctttacaaagtcgtgaatgagaagaataaggtgacgcttatcaaacaagacgaacaaaagaatccgttggaaggagccgtgttcaagctggagaaaaaatccggcgatggcacctttacaacaatacgtacgagtattaagagcaatgaaaacggaaaagtagaaatcaacggtttaccgcccggcgattatcgtttgctggaaacgaaagcgcctgaaggttatctcttaaatacaaaagaactcggcttctccgtcaaaacgaatgataagaatcaagtgcctgacgttgatttaggagcattgatcaactataaaggcagagcgcatttaacgaaagaggatgcagaaggccgtcaattagaaggggctgaattcaagctcgtcgatcatgaaggcaaaaccattcatgaaaagctcacctcagatcaagacgggaaaaccgcggtatctgaccttgcgcctggccgctatgcctttgttgaaaccaaagcgcccgagggctatgtgataaacagcaaggcaatcgagtttaccatatctgaatcggcaaaagaaaaaccggaatccgtggacgcaggcaaagccgtcaactataaaggttcggtttatttgacaaaagaggatgcggaaggccgtacgctgaagggcgctgagtttaagatcgttgatcatgaaggcaaaaccgttcatgaaaagctcacttccgatgaagacggaaaaatcgcagtttcaggcctggcgcctgggcgctatgctttcgtggaaacgaaggcgcccgagggctttatgttaaacaacgatcaaatagaattcaccatcccgggctcagctgaagggaaaccggagccggttgatgcaggcgccgctgttaattataaaggctcggttcatttaacaaaagaagatgcgaaaggccacaagcttgaaggagccgtttttaagatcgcagatcaaaacgggaataccgtacaggaggaactggtttcagatcgaaatggaactgttacggcttcaggcctggcgcctgggcgctatgctttcgtagaaacgaaagcgcctgatggatttgtattgaacagcgggaaaatagagtttgtcatcccggatgccgctgaaggaaaacctgcgcatgtagatgcgggtaaagccatcaactacaaaggttcggtttatttgcagaaagaagatgaagacggcaatggattagaaggagccgtgtttaaaatcattgacagcgaaggcaaaacggtcaaagacgatttgatctctaaagaaggcggcaaaatcgaggctggcgatttggcgccgggaagctatcaatttgttgaaaaacatgcgcctgacggctacctgctgtcaacagatccgatcccattttccattaccgggaaacacgaaggtgagccgaaacaggttaaactgacggctctcaacaagaaaaacagcgttgtgctcacaaaagtcggccaggatgacaagagcgccggacttcagggagcgcagttcgatttgacagatgaaaccggcaaggtgctgaaaaccggtttggcaacagacgcagacggccggatcacagtgtacggtcttaagcccggtaactaccaatttgtcgaaacaaaagcgcctaagcattatcaattggataagacgccaatatcgttcacagtcaaaaatactgatacaaagcaaatcgaactgactgcagagaaccaattgacacctggcgatgtgaaactgacgaaagtggacagcaacaataaaaaggctgttttaaaaggagccgaattcaaactgctcgatgccgatggaaagccagttaaagccggaggcaacagcaaaaagctgccggcagtctggactacagaccaaaacgggcagttcacagcggagggattggcacctggacgctatcaatttgtcgaaacgaaggctcctgacggttacaagctggatgaaacaccgattccttttgaaattaaaaaaggacagacaaaaccggtcgaggtgatcgcgtccaatgaaaaactgaaaacgccggctgttgataaaggcgcaccggacccgaattcgggagaccctaaaacagataacaaaggcacaccggaccgaaattcgaaaggagatcctaaaacaaatgacaacggtcatttgaaagatacgcttccgaaaaccggtgacacagacagcatcattccgatcatgatcggcatcctgctgattctgtctggaggagccttcgctttcttcacaagaaagaaacaaagaaaggcgtaaacgaatcattgaagcacctgatcattgaaccggtcaggtgcttttttaaagaaaggactgtgaggcatgtataaaaaaatgatcgttgccgtgcttgtcatatcaggaatactcttcgtcttgtctcctttcattaaagaaagcatcatcatcaatctcaacaagaataaaaattttgatttgactgctgaacaggcggaacaaaacaatgcacaaaaggcttcatttgattttgaggcgattcagccgccttctattttggaaacaataaaagccagcctcgatcgtgaatcaaaagcggtcatcggccggatcaccataagcagcgtcaatctcaagcttccgatattgaagggcacaaccaatcaaaatcttctttacggagcgacaacaatgcgacccgatcagaaaatgggcgaaggcaactacccgctggcaggccatcatatgaagcgggagagcctcttattcggtccccttctcaacattgaaaaaggagataccgttaaaatcacagactttaaaaaagactatatatacgctgtgacgtcgaaacaattcatttctgaaatggacacagatgtgattcaagagacgaaaaaaaaggaaattacactgattacatgtgacaaagctgtgagaaccgaaggacgccttgctgtcaaaggaaagctgattcatgttgctgtacacagataattgaatgtccgctgcaggcaggcaaaaatactgagggattgccccttggtatttttttattgggactaaaattctatacatcacaaaaaaatgacaaaaagatcactatgaaatgacaagagtaaaaaagtaatgagaaataacaaaaaagaaaatgaaacgatgcggattggatatttttctttcataccggggttggcggcgattttactcaatgaaaatagataagttttctgaaatttatattgactgaaagcgcttttaaaattatgataatatcagatctaacaaagatgtaccaaaaacataactataacctaacaatttatttaaacggaatagaaatgaaagcgattccaaaatattccgttgcgggtaattggttgcaaggaggcttcagcttccatcaaaataaaatttttaattttctgttaaggaggggttgcttggggcgaaactttcaaaagttagatatgaagcttttaggaaaaagaaatgagctactattaaggatgtttcgaaaacctttggaaataaatcaattttcatttaaacaaaggcgggggaaatcaatatgaatgaacagggaaatcagaaatcatttttgcgtactattattttagtctcgacgttcggcgggcttctattcgggtatgataccggagtaatcaacggagccttgccttatatgtctgaaggagatcagctgaacctgacagcatttacagaaggattggtcgcgagttcgcttctcctgggagccgcattgggagcggtgttcggcggaaggctatccgattatatcggacgccgcaagaacatcatttttctagctgtacttttctttttctcgacgcttggatgtacgcttgcgcctgatgtgacggttatggttatctcacggttcctgctcggagttgccgtaggaggagcatctgttacagtcccgacttacttggctgaaatgtctccttcagaaaaaaggggacgaatggttacccaaaatgaattaatgattgtctccggacagcttttggcatttaccttcaatgccatcctcggaaccacaatgggcgattcctcacatgtttggcgttacatgctggccattgccgcagtcccggctgtattcttgttctttggtatgctgagaatgcccgaaagtccgcgatggcttgtctctaaagggaaaaatgaagcggcgctgggtgttctgaaaagaatccgcaaggaaaaaagggcgcattcggaagttgctgaaatcgaagctgcagtcatgaaagaatcggaaatgaaaaaagcgaattataaggacctggctgttccttgggtgcgccgaatcgtatttcttggaatcggtatcgctgtcgttcagcagattaccggtgtaaactctattatgtattacggaacagaaattcttaaaaatgccgggtttgaaactaaagctgcactcatcggcaatattgcaaacggtgtcatttcagtattggcgacgttcgtggggatttggcttttaggaaaagtgggacgcagaccgatgctgttgaccggtttaataggaacgacatcagctttgctgcttatcggcatcttctcaaacgtccttcaaggttcagctgctcttccttatgtcgtacttacgctgactgtaaccttccttgcattccaacaaggcgccatttctcctgtaacatggctcatgctttctgaaatattcccgcttcgcgtacgcggcctcgggatgggcgtcaccgtgttttgtttgtggatcgccaatttctttgtcggattctcgtttccgatactgcttgaatcgattgggctgtcctcgacattctacatttttgtcggacttggacttctttccattgcattcgtgaaaaaattccttcctgaaacaaaaggcctcacgcttgaacagcttgagcataatttccgcaactataaatcggaaacagcacaaagcggtgcaagcgctaaaatcagcgggtgaccatttgaattgttgagggacatgcaggtcgagtctcaacggcagagcataagagcatatagatgaagcatttgaagtttgcaggcggaaattttcctatagcgaagatttctgcctgcatatttgtatgtatcggaggcgtcttagatatcctaaaagaagatcttgaataaaagcttcattaaatgaccgtgcaaaagtgctgtcgaggttaatggtttatagttcggttcagtatatattgtaatgaagttggggaacattcaataaaacatcacataagatgaaaaggcaagtaaagcgtcatttattatgaatggctgtaagcattattttttcaggggtataaaaaatgaaaaaagtgttgacggatcagttggatgcatgatatattattattcgtcgctgagacaacgaagttacagcttttaaatacagatattatattcatcatttaaagggtgtacaaaaatcttaaaatgtgtataatggataaagtcgaaacaaaaaagacttcattcattcggcagaaaaacttcaaaaaacttcttgactttaactgatattcatagtattatagttaagtcgcctgatgaagcgcccgtagctcaattggatagagcgtttgactacggatcaaaaggttaggggttcgactcctctcgggcgcgccatatattcgcgatgcgggtgtagtttagtggtaaaacctcagccttccaagctgatgtcgtgagttcgattctcatcacccgctccatttttagaatgatctttgaaaactaaacaagacaaaacgtgcctgttaattcattaaataaatcgtacatgcgaatgtgcgtagtcaggggcctgcacgatgcaggtcatgcagatgttgtcacaggatgtgacgaacttaatctgcgctccattacttcatggagagtttgatcctggctcaggacgaacgctggcggcgtgcctaatacatgcaagtcgagcggaccgacgggagcttgctcccttaggtcagcggcggacgggtgagtaacacgtgggtaacctgcctgtaagactgggataactccgggaaaccggggctaataccggatgcttgattgagccgcatggttcaattataaaaggtggctttcagctaccacttacagatggacccgcggcgcattagctagttggtgaggtaacggctcaccaaggcgacgatgcgtagccgacctgagagggtgatcggccacactgggactgagacacggcccagactcctacgggaggcagcagtagggaatcttccgcaatggacgaaagtctgacggagcaacgccgcgtgagtgatgaaggttttcggatcgtaaaactctgttgttagggaagaacaagtaccgttcgaatagggcggcaccttgacggtacctaaccagaaagccacggctaactacgtgccagcagccgcggtaatacgtaggtggcaagcgttgtccggaattattgggcgtaaagcgcgcgcaggcggtttcttaagtctgatgtgaaagcccccggctcaaccggggagggtcattggaaactggggaacttgagtgcagaagaggagagtggaattccacgtgtagcggtgaaatgcgtagagatgtggaggaacaccagtggcgaaggcgactctctggtctgtaactgacgctgaggcgcgaaagcgtggggagcgaacaggattagataccctggtagtccacgccgtaaacgatgagtgctaagtgttagagggtttccgccctttagtgctgcagcaaacgcattaagcactccgcctggggagtacggtcgcaagactgaaactcaaaggaattgacgggggcccgcacaagcggtggagcatgtggtttaattcgaagcaacgcgaagaaccttaccaggtcttgacatcctctgacaaccctagagatagggcttccccttcgggggcagagtgacaggtggtgcatggttgtcgtcagctcgtgtcgtgagatgttgggttaagtcccgcaacgagcgcaacccttgatcttagttgccagcattcagttgggcactctaaggtgactgccggtgacaaaccggaggaaggtggggatgacgtcaaatcatcatgccccttatgacctgggctacacacgtgctacaatgggcagaacaaagggcagcgaagccgcgaggctaagccaatcccacaaatctgttctcagttcggatcgcagtctgcaactcgactgtgtgaagctggaatcgctagtaatcgcggatcagcatgccgcggtgaatacgttcccgggccttgtacacaccgcccgtcacaccacgagagtttgtaacacccgaagtcggtgaggtaaccttttggagccagccgccgaaggtgggacagatgattggggtgaagtcgtaacaaggtagccgtatcggaaggtgcggctggatcacctcctttctaaggatattatacggaatataagaccttgcggtcttatagacaggtgcgtttggatcttgtttagttttgaaggatcattccttcaaagcgtgttctttgaaaactagataacgaaagtagacattcacattcaattgtaatgcaagatatcacgtagtgattctttttaacggttaagttagaaagggcgcacggtggatgccttggcactaggagccgatgaaggacgggacgaacaccgatatgcttcggggagctgtaagcaagctttgatccggagatttccgaatggggaaacccactgctcgtaatggagcagtatccatatctgaattcataggatatgagaaggcagacccggggaactgaaacatctaagtacccggaggaagagaaagcaaatgcgattccctgagtagcggcgagcgaaacgggaacagcccaaaccaagaggcttgcctcttggggttgtaggacactctgtacggagttgcaaaagaacgaggtagatgaagaggtctggaaaggcccgccataggaggtaacagccctgtagtcaaaacttcgttctctcctgagtggatcctgagtacggcggaacacgtgaaattccgtcggaatccggggaggaccatctcccaaggctaaatactccctagtgaccgatagtgaaccagtaccgtgagggaaaggtgaaaagcaccccggaaggggagtgaaagagatcctgaaaccgtgtgcctacaagtagtcagagcccgttaacgggtgatggcgtgccttttgtagaatgaaccggcgagttacgatcccgtgcaaggttaagtttgaaaagacggagccgcagcgaaagcgagtctgaatagggcgcatgagtacgtggtcgtagacccgaaaccaggtgatctacccatgtccagggtgaagttcaggtaacactgaatggaggcccgaacccacgcacgttgaaaagtgcggggatgaggtgtgggtaggggtgaaatgccaatcgaacctggagatagctggttctctccgaaatagctttagggctagcctcaaggtaagagtcttggaggtagagcactgattggactaggggcccctaccgggttaccgaattcagtcaaactccgaatgccaaagacttatccttgggagtcagactgcgagtgataagatccgtagtcgaaagggaaacagcccagaccgccagctaaggtcccaaagtatacgttaagtggaaaaggatgtggagttgcttagacaaccaggatgttggcttagaagcagccaccatttaaagagtgcgtaatagctcactggtcgagtgactctgcgccgaaaatgtaccggggctaaacgtatcaccgaagctgcggactgttcttgcgaacagtggtaggagagcgttctaagggctgtgaagcgagaccggaaggactcgtggagcgcttagaagtgagaatgccggtatgagtagcgaaagaggggtgagaatcccctccaccgaatgcctaaggtttcctgaggaaggctcgtccgctcagggttagtcgggacctaagccgaggccgaaaggcgtaggcgatggacaacaggttgatattcctgtaccacctcctcaccatttgagcaatggggggacgcaggaggatagggtaagcgcggtattggatatccgcgtccaagcagttaggctgggaaataggcaaatccgtttcccgtaaggctgagctgtgatggcgagcgaaatatagtagcgaagttcctgattccacactgccaagaaaagcctctagcgaggtgagaggtgcccgtaccgcaaaccgacacaggtaggcgaggagagaatcctaaggtgatcgagagaactctcgttaaggaactcggcaaaatgaccccgtaacttcgggagaaggggtgctctgttagggtgcaagcccgagagagccgcagtgaataggcccaggcgactgtttagcaaaaacacaggtctctgcgaagccgtaaggcgaagtataggggctgacgcctgcccggtgctggaaggttaagaggaacgcttagcgtaagcgaaggtgcgaattgaagccccagtaaacggcggccgtaactataacggtcctaaggtagcgaaattccttgtcgggtaagttccgacccgcacgaaaggcgcaacgatctgggcactgtctcaacgagagactcggtgaaattatagtacctgtgaagatgcaggttacccgcgacaggacggaaagaccccgtggagctttactgcagcctgatattgaatgttggtacagcttgtacaggataggtaggagccttggaaaccggagcgccagcttcggtggaggcatcggtgggatactaccctggctgtattgaccttctaacccgctgcccttatcgggcagggagacagtgtcaggtgggcagtttgactggggcggtcgcctcctaaaaggtaacggaggcgcccaaaggttccctcagaatggttggaaatcattcgcagagtgtaaaggcacaagggagcttgactgcgagacctacaagtcgagcagggacgaaagtcgggcttagtgatccggtggttccgcatggaagggccatcgctcaacggataaaagctaccccggggataacaggcttatctcccccaagagtccacatcgacggggaggtttggcacctcgatgtcggctcatcgcatcctggggctgtagtcggtcccaagggttgggctgttcgcccattaaagcggtacgcgagctgggttcagaacgtcgtgagacagttcggtccctatccgtcgcgggcgcaggaaatttgagaggagctgtccttagtacgagaggaccgggatggacgcaccgctggtgtaccagttgttctgccaagggcatcgctgggtagctatgtgcggacgggataagtgctgaaagcatctaagcatgaagcccccctcaagatgagatttcccattcctataaggaagtaagatccctgaaagatgatcaggttgataggtctgaggtggaagtgtggcgacacatggagctgacagatactaatcgatcgaggacttaacctaaatatttgtgaatcgtctgtccgttatctagttttgagagaatgctctcagaaagccaaaggcaaggaaactcggctaaaggccctcacatcctgtgaggaacgcccagtaccttcgtcctgaaggcatagtttggtggcgatagcgaagaggtcacacccgttcccatgccgaacacggaagttaagctcttcagccccgatggtagttgggggcttccccctgtgagagtaggacgcccgccaagctgtttatattatcgcggggtgaagcagttcggtagctcgtccgggctcataacccgaaggtcgcaggttcaaatcctgccccccgcaaccaaatataatttgcatacaatcaaaccaaaaataaataaaaatatggtccggtagttcagttggttagaatgcctgcctgtcacgcaggaggtcgcgggttcgagtcccgtccggaccgccatgttgcacacaaacgaaatcttcgaggttttcgtttttttttatgtcttttttcaggtcaatgctgaaactcggtttctcttctgacgggatgtgaagctcgaatttctttattccttggataattggtgagaattcgataaactaatgatagtgttttgattggtttgcaacagcaaaggagcaaatgatcttatggacgaatttgaattaattcaaaggattacgccccgttcgctttctcatcgggaaatagaaatcggtattggagacgatgccgctgtttatcatacgaagaacaattatcaggagatcgttgcagtcgatacgatggtcgacggtattcattttttatcatcccattcatcgcctgccgatatcggatataaagcattggctgtgaatattagcgatattgccgcaatgggaggccgacccaagtactatcttgtgtcaatcgccgttccttccggttggggcgcgacggatattgaagccatgtatgaagaaatgaataaactggcgacactatatgaaatggatttaatcggcggggacaccgtatctgcaaacgggccgctcgttttgaccgtaacagcaatcggcgaaattgaaaagggcagatcttgtttaaggagccatgccgagcccggtgatgtcgtttttgtgacgggagaacttggctcatcagctgccggcctgtcttttatattgggccaaacatcggcgagagacgagacgcagtctcaatactttattgagcggcacaagaggcctgagccgagggtggaagcaggtttgatctgttcacgctatcaccatgtggcgcttaatgatatcagcgacgggcttgccagtgaattaaatgaaattgctgaagcgagccgtgtttccattgacatatataaagagttgattccggtccattcggatttacatatattgcacacaaaatgggaagagtgggtccttttcggcggcgaggattttgaactcgtcggtacgatttctaatgatcaatgggaacgttttagtcaggaatgctccgagcatgatgtgcgggttcatcaaatcggccgcgtcacaaaacaaggacaggcggaagtgttttatcatgacggacaggaccgcgttcttctcgaaaaaaaaggatataaccattttaaacaagacaggtgacaagtaaagtgaaaacgttagagtggaaaacgacagagcctgaagagacaaaaaacattgccaggctggcggcaaaatatgttcagcccggtgatgtcatcacattggagggcgatcttggagcaggcaaaacgacttttacgaaagggtttgccgaagggatcggcatcaagcgggttgtcagcagcccgacttttaccatcatcaaagaataccgtgacggctctcttccgctgtttcatatggatgtgtacaggatggaagacgagacggaagatctcggattagatgaatattttgagggagacggcgtctgccttgtggaatgggcgcatttgattgaagagcagcttccaaaagaacgccttgaggtggtcattaagcggcttggtgatgacaagcgaaagctgacctttacacctaaaggcaggcgctacgaaaatctttgcgaggagatcagcaaacatgacgatacttgcgattgatacatccaatttaacgctcggagtggcattaatcaaagacggaaaagtgatagccgagcatatatcccacttaaagaaaaaccattcggtcagagccatgccggcaatcgacgaactccttaaagagtgcggtttaaagcctagtgacctgacccaaattgcagttgccaaaggcccgggttcatatacaggcgtgcggatcggcgtgacgattgccaaaacgcttgcatggtcattaaatattccggttaaaaccgtttcaagccttgaagtgcttgcggcaaacggccgttttttccaaggcttgatttgtccgttgtttgatgctaggcgcggtcaggtttatacgggactgtaccagtatagggacggcaaactccatggattggaagaggaccagaacattctgcttgaagattggctaaaaaagctgaaagccatggatcagcaagtccttttcataggaagcgacaccgggattcacagggaaatgatcgaacggattctcgatgaacaagcggttattgcagaccctgccctgcagcttccaagaccttcagaattggctttaatcggagaacttaaagaggacgagccagtgcacagcattgttccaaactatattcgtctggccgaagccgaggccgtctggcttgaaaaacaaaagtaaacgggtgaagccatgaacacgcaaatggtcatacgcgatatgaatccaaaggatttggaccaggtttttgaaattgaaaaaagctctttttcttctccgtggaaaaaagaatcttttcatcatgagctttttcacaatatgtatgctcattatctcgttctcgaagttgaggagcaagtcgtcggctactgcgggatttggatcgtaatggatgacgcccagatcaccaatattgccgtttcacctgcataccggggccgccgcttcggtgaagctcttttgaaggcggccatgaagctttgccggatgaaaagggcggttcagctttctttagaggtgagggtatcgaatcatattgcacagagcttatacaaaaagctcggctttgagccgggaggaattcgcaaaaattattataccgataatggggaagatgcattattaatgtgggtgagactaaatgaatcataaaaaagatctgtatgtattaggaatcgaaacaagctgtgatgagactgccgctgcgattgtcaaaaacgggacggacatcatctcaaatgtcgtagcgtcgcaaatcgagagtcataaacggtttgggggcgtcgttcccgagatcgcatcaaggcatcacgtggaacagatcacgatcgtgcttgaggaagcctttgcacaagcggacatgacgtttgatgacattgatgccattgcagtaacggaaggaccggggcttgtaggcgctctattgatcggcgtgaatgctgcgaaagcgctcagttttgcccggggcataccgctcgtaggcgtgcatcatattgccggtcacatctatgccaacaggcttgttcaggacattcaatttccggcgattgcccttgtcgtctcaggcggccacaccgaactcgtatatatgaaagagcacggctcatttgaagtaatcggagagacgctcgacgatgctgcaggcgaagcctatgacaaagtggcgagaacgatggggcttccttatccgggtggacctcacattgacaaacttgcgcaaaaaggcgaggcaaatgtgccgctgccgcgcgcatggcttgaagaagggtcttatcatttcagcttcagcggattgaagtctgcagtcatcaacacgcttcacaacgcttcacaaaaaggcgaaacgatagctccggaagatttgtcagccagctttcaggaaagcgtcatagatgtcctcgtgacaaaaacggaacgcgctgcggaagcttatggcgtcaaacaggtgctgcttgccggaggagttgctgcaaacaaagggctgagagccgcgctcgaaaaaacgttcagcagccgtccggagatcgagcttttgatcccgccgctctcgctgtgtacggacaatgccgccatgattgccgccgcaggtacggttgcttttgaaaaaggaatcagaggaaaatatgatatgaatggtcagcctggcttagatctgacgtcttattgaaacctcacgctttgtgaggtttttttacccggaaaaagttattaacaagttatcaacacatatccacagtcttgtgtataatgttaaaaaccttaatttacagaccttttttacctgttagtaatgtgtataaatattatgttatttgtggatattgtgggtaaatcgctttctttcttttaaataaaggatttcaattgtggacaaaaaaaccgctccggcttggagcggctcatcctttattcatttgtagatagtgtttcccattctgataacagctgttcaagctcctcattcagctgttcattttcagagtggatttcctgaaccttctcgtggtcttggaagacgtcgggattgcataggagctcttcattcttttcaatttgttcttcaatggccgtaattcttgtttcgatgtcttcaatcctgcgctgccgctggcgttcttttcttttcagctctttttcttcttcatagctcttttttgcgcccggtttttcggaagcggctttctgacgctcttccgtctgtttttctagttctttcagttcaagctgctgcgcttttttttccgtgtaataatcgtagtcgcctaaatattcttcggctttgtcgcgagaaagctccagtacttttgtcgcaatccggttgataaaatagcggtcatgggacacaaataatatcgttcccgggtaatcgattaaagcgttctccaagacttccttgctgtccaggtcgagatggtttgtcggctcatcaagaataaggaagttcgctttttgcaacatcagcttggcgagggcaagcctggctttttcgccaccgcttaatgcatgtacaggctttaatacatcttctcccgagaacaagaagttgccgaggcaggtcctgatatccttttcattcatctccggataatcgtcccaaagctcgtcaagcacgcgttttgacgacgtcaattcagcctgttcctggtcgtagtatccgattgagacgtgagagcccgtcgcgattgttcccgacaccggctgcagcttttggatcaatgctttcaaaagggtcgacttgccgattccgttcggcccgactagtgcaacgctttccccgcgggtaatgcgaaaatccagtgaacggagaagcgggggctggtcctgatagcttaccgtcaggtcttccactcgcagtacatcgtttccgctttgccttgtaatttcaaagcggaatgacgccgacttttcatctccaagcggtttgtccatgatctccatccgttcaagctgctttcgtctgctctgcgcccgtttcgtcgtcgaagcccttgccaagttccgatcgacgaaatcctgcagcttggcgatttcgtcctgctgcttttcgtaaagctttgtttccctttccagctgctcggcttttaattggagataagagctgtagttcccgatatattttttgctttgggacctggtaatctcgtaaacttgggtaaccactttgtcaagaaagtacctgtcatgggaaacgattaaaatcgctccgctgtagctttgcaaatattgttcgagccatgtcagggtgtcgatatccaagtggtttgtcggttcgtccaaaatgaggaggtcgggttttgtcaaaagcatttttccgagggcaagtcttgttttttggcctccgcttaaatcctgaacgcggacggagtcgtcaaatcccgcaaagccgagcccgtgcatgacggatctgacctctgcctcatattggtagccgcctttgtccttgaactcctgctgaagcctgtcatatgtcttcattaatgattcaagcttgtccggtccggcttgcgccatcttttcctcgatcgcgcgcatttctttttccatttttttaagaaaatcaaataccgacagcaattcctctttaagcgtcagcttggaatcgaggccggaatgctggtcaaggtagcccatcgtcaaatctttaggtttgatgatgtcccccttttcgtatgagagctttcctgcgataatctttagaagagtcgattttccggcgccgttgcgtccgacgaccgcaatccggtcccgagacctgacttcgagttttatattcgttaaaatcgtatcggctccaaacgattttgaaagctgatttacttgtaaaatcatcatgatctttcacctcttgtctgctattttaagtgtagcctatcaccgcgcagtcagcaaacaattaagtgaagtctggaagattttagccaaagaaaaagacagattgaaaaaaatagtgtatgatcattataaggagagttaagaacatgaatgagtttacacattttaatgaacaaggcagagccaagatggttgatataagcgaaaaggaagcttcagtgcgcacagctgcggctgtttcaagcgtgtccatgaatcgagaagtacatgaaaaaatcaaaaaccgcgaaatcggaaaaggcgatgtgttggcggtggcgcaagtggccggaatcatggctgcaaaacagacatccgccatcatcccgatgtgtcatccgatcgctctgaaaggagtcgacatcgccttttgctgggagaagaaagagcagaagagcatcctgcatatacaatctaacgtcaagaccaaagggagcacaggtgtggaaatggaagcgttaacgtcggcctccgtatgtgcgctgaccgtttatgacatgtgcaaagcggcggataagggaatggtgataggaccgacctttcttctcgaaaagacaggcgggaaaaacggtgactataaaagggaaaaagctgatgtagacatggaggattagtttatgaacatggatcattcaaaaattccgcaagcgacagcgaaacggctgccattatattatcgttttttaaaaaaccttcatgcatccgggaaacagcgtgtatcttccgctgagctgagcgatgccgtcaaagtcgattccgcgaccatccgaagggatttctcgtacttcggcgcgctcgggaaaaaaggatacggctacaatgtcaattatttgctgtcctttttcagaaagacgcttgatcaggatgaaacgacgaacgtaacgcttattggcgtggggaatttggggacagcctttctccattacaattttatcaaaaacaataatacaaaaatcgccatggcgtttgacatcaatgaagaaaaaatcggaaccgaggtcggcggcgttcccgtctatgacctgaataagcttgaagagcatatgacggatgatgatatcccggtcgccattttgacggttccagctcaagccgcacagtcgattacagacaggctggtggcgcttggcattaaaggcattcttaatttcacgccggctcgcttgaatgtgccggaacacattcgcattcatcatatagatttggcagtggaacttcagtcgctggtgtattttctgaaacattattcaatgcaggaaaagtaaaacggaaaacgaaaaataaataaaggaaagggggcaggctttatgccaacaatcggtcctggaagctttattttaattgtcgtggtggcgcttttgatattcggcccgaaaaaacttcccgagctgggaagagcggcgggaaacacgctgcgggagtttaaaaatgcgacaaaaggtttggctgacgacgattccgataataaaaagaaagaagatcagtaggataggatgacatttatgaagggaaaagaaatgtcgctgttagaacatatcacagaactgcgcagacggcttgtgatcacttttttcttttttgttttgtttgttgcggcaggcttttttttggcgaagccgctcataatctacctgcagcagacggatgaagcgaagctgctgactctcaatgcgttcaagctgaccgatcctttatttgtgtacgtgcagttcgcgttcatcatcggcgctgtcttgacttcgccgcttgttctataccagctgtgggctttcatcagcccggggctgtatgaaaaagaacgaaaagtgacgctcagctatattccaatatcgatcattctttttttaggcggcattgccttttcttactttattttatttccgtttgtcgtggactttatgacgagagtctcagatgatctgaatgtcaaccaggtcatcggaatacacgaatattttcagtttctgcttcagttgacgcttccttttggcttgttgtttcagatgcctgtggtcatcatgtttatcacaaggctcggtctcgtgacgccgatgtttttggcgaaaatccgaaaatatgcatattttgtgttgttcgtcattgcggcgctcattacaccgcctgagttattgtcgcatttaatggtctccgtgccattgctcattctttatgaaatcagtatcgtgatttcaagaatatcctacaggcaggcgcaaaaaacaatgattcaagaggaaaatcaatcgtttttgaacgaccatacaaaataagagccattcttttttcagaatggctcttttctttcaaataaaaggctattgatcttttcgcttcatcctgccggccagggcgaacattttaaaggagatgctgatattataggctgcgaaaagcatcagcaggatcgtataaaaagaccacatgcttccgggcgaggttgccgcgagatacgtaaacagcacacccgttaataaataaatcactccccagattttagggcttctcatcatagaaatcctccaataatcatttgcattttctcgacgtttttcaaatattcttcaataggctcccggaatgtctgcagcaagacgacgagcgtattcatggcgacatgggcgaaaatcgggacgataatccggttggtcctgacatataaaaaggcgaatgtgaatcccattgccgtataaatgagcagatggctgaaatccaaatggacgaccgagaagagcaccgaactgaacagagcggcaacgaaaaaattcgttttctcatagatcgcaccgaaaatgatctttctgaaaatgatttcttcaagaatcggaccgaatacagaagagacaaacaccatcagcggcaatgcggtgatgattttcataatccgctgcgtattttcggattccgggttgaccccgaacaagttcatttcgatcgaagcggcaattgactgcgcaaacaaagcgagaaaaacgccggctaccgcccatccgattgacgctgcaaccgatgcttttggacgattgcgaagcgtcgtcttcggcaccgtccgcaaaatcagcagcacgatgacgagacagagggtaaacgcgatgacagaccagacgcccgtcaatgtaagctgagcttcagccttgggctgtcctctgcccactcccaaaaagtagagaagaggcaagccgacaaccgccgacaattgcatgagaacgtatgccaatataataaaccagtattgttttctcaagctttatgtactccttttctaaaaatctaaatcagactatgtttattgtaacacactctttttaaattataggatgataaggatatgcggagaaatgtaagcgcaaaaaaatttgaccttttcacttgaaattgcctgggagattctttattataagaattgtgttagcactcaccgagtgcgagtgctaaaattacatatgaaaatattgaggaggttgtttcattgttaaagccattaggtgatcgcgttgtcattgagctcgttgagtctgaagaaaaaactgctagcggaatcgtacttcctgactccgcaaaagaaaaaccacaagagggtaaagtggttgcagccggttcaggccgtgtgttagagagcggagagcgcgttgcattagaagttaaaacaggcgaccgcatcatcttctcaaaatatgcaggtaccgaagtgaaatatgaaggtactgactacttaatcttgcgtgaaagcgacattttagctgttatcggctaagtcataaataaaaacgagacaattatataggaggttcgaataacatggcaaaagatattaagtttagcgaagaagcccgccgttcaatgctgcgcggtgtagatgcattggcggatgctgtaaaggtaactttgggacctaaaggacgcaacgtcgttcttgagaaaaaattcggttctccattaatcacaaacgacggtgtaaccatcgcgaaagaaatcgagcttgaagacgcgttcgaaaacatgggcgcaaagcttgttgctgaagttgcgagcaaaacaaacgatgttgccggtgacggtacaacaacagcgacagttctagctcaggcgatgattcgcgaaggtcttaaaaacgtaactgccggcgctaaccctgtaggcgtgcgcaaaggtatcgagcaggctgtggctgtagctgttgaaagcctgaaagaaatctctaaaccaatcgaaggcaaagaatcaatcgcacaagttgcttcaatctccgctgcagacgaagaagtcggaagcctgatcgctgaagcaatggagcgcgtcggcaacgacggtgttatcacgattgaagaatccaaaggattcacaacagagcttgaagtggttgaaggtatgcagttcgaccgcggatatgcgtctccttacatggtgacggattccgataagatggaagcggttcttgagaatccgtacatcttagtaacagacaaaaaaatcacaaacattcaagaaatcctgccggtgcttgagcaagtcgtgcaacaaggcaaaccgttgcttctgattgctgaagacgttgaaggtgaagctcttgcaacattggttgtcaacaagcttcgcggaacattcaacgcagtggctgttaaagcgcctggattcggcgaccgccgcaaagcgatgctcgaagacatctctatcctgacaggcgccgaagtgatcacagaagatttaggtcttgaccttaaatcaactcaaatcaatcaattgggacgcgcttctaaagttgttgttacaaaagaaaacacaacaattgttgaaggtgcgggagatacagagcaaatcgcggcacgcgtcaaccaaatccgcgctcaagttgaagaaacaacttctgagttcgataaagaaaaattacaagaacgccttgctaagcttgcaggcggcgtagctgtcatcaaagtcggagctgcgactgaaacagaattgaaagaacgcaagcttcgcatcgaagacgccctgaactctactcgcgctgcggtagaagaaggaatcgtatccggcggtggtacagctcttgtcaatgtttacaataaagtagctgcccttgaagctgaaggcgacgaactgactggtatcaacatcgttcttcgcgctcttgaagaaccaatccgtcaaatcgcgcacaacgcgggtcttgaaggatctgtcatcgttgagcgcctgaaaaatgaagaaatcggcgtcggctacaacgctgcaacaggcgaatgggtgaacatgatcgacaaaggtatcgttgaccctacaaaagtaacacgctcagctctgcaaaacgcagcatctgtagcggctatgttcctgacaactgaagcagttgttgccgacaaaccggaagaaaacaaaggcggcgcaggaatgcctgacatgggcggcatgggcggcatgggcggcatgatgtaagcccagcgtccaaacgttgatatatcaaggaaaagaggctctttttagagcctctttttttaaaaaatcacataaaaatcacattttttcggttttaaaacttgtgataccttgtaggaaacatttcattttattaaatgtttctttcttcatcttgtttgttatgtgagtatgaatttcaattatggctctcatatcagtatggccaactctcttcataatctcccccagagtgtttcattatttgacctaactcatggcagaagtctttccagtgctgctccttgtttttaagagactatcgaaaaaaaccacattacttaaacaaaacttaaagatcccacacttgttaggcatgtacctaatttgaatgtctaatctatcagcaataactttcatatcgacttgggaaggttctgctatgtttatttatatatatatgtattgaacttcttcttctaattttgaaaggtagtacattaaaatccccctgtataatgaaaactgatgctctctttttggtgatttgaaaacccgattaaacgggtttaaaagtttattttttcaaaacttgaagcgttattgaagtaacgaaaaggagcaggcataatgcctgctcctctatcttgaaactaacgagattcatttgaggatttaaggtaactgatgaacaatggtgaaatgacaattactgttacaattaataatagtctgctagatattaaatttacaaatgtagtgttaataatatatagggctaaaaccattaaataaaaagccacgtaaacataagcatacacttttttgctgaatggttctttcatgtaaatgaaaagaaataaccctgccattaaaactaagaaagtcatattttccctctttcatttttattgtggaaaaaccccagttggaacagctgcatatccgagtccagtaaaacgtattctaacaccatgaccttcatgttcgtcttgaatcatttgaccaaaaccaactagtccgcctccgattactccggaaattacgcttgctaattgtgtaggaggtacgggtataacccttgatattaaagcaagaccagaggttgctccaccgcctgctttaaatggttcttgtttcattacagtcaaaataaagattatatccccaccagtagagatcatgaccagatcgaccgcagccttttttcgctactttcattttatgattgtttccattctccagtgtcaatacactaccgtctttgtctaaaattttcacactaaaatcggagttaatgacagcttctttttgtttcactaaatcgttcaagtatttaatccagtcttgaacttcgttggtgacagaacgtgaaatatctagtttagtataagatggatctaaggtaagagttccatctgcgtttaatttaagataagcttctaatttctttacatcattcatactcacctttacattcttaaattcttcgctgttcagtttttgatcgggtgcagaatttcctttatatgctccagtagtttcagtatgtagtttttcgttgtcagttagttctgacgctgatactatattgaaaatacaggtgaaaccaatattaatgtcagtaccataacaaatgtcttaaaaccattgtgcttcttttctttcacgataatgccacccttcttattatagatcaacctcattttacttgaaaaacaaggtaatttgcggcatgatgtgtataacagtaaaaaagaaccatctaaaatcttgtgcgtaatgaaattatactaggtgtgattaattagaatatggagggctaatttaagaaggaaaaaaacgattaagatgaaggatgttatgatgtaactatgttgatctttggattataggtcttactttatttctctaaaaacagcatcctcaaatttaatgaaattggtgtctccttccacaatatgaaaaaccttacggatatgatttatgtaatgaatttttccttctatgttaatagtctctcctgattctgctctatttaaaaagggcagcggtttaaatacagagaacagaactgttaaattaaattccattgcttcacatattatcttatccatgtcttctatttgaaccatgtcaagaaccggccttttaaccttgttccgattgctttctaattcgcggagcaggctgaggtgttccgacagcatcatagctgttcatttgattgatccccgatctttcaagttgtcatctttcatggtgttatctccttgagtttcaatcgtgaattaatggaaacagtgttttagctattttggttacaaaatcggtcacggtttcggaatttgaaggtgtatgcggcatgatgtaagcccagcgtcaaaaacggctgatatatcaaggaaaagagcatctttttatttaacttgcgatgacatataaatacccttttatccatggaataatttccttttgggggattatggtataattagcatctgaatttttaacagaaaggttaaacaattgatgtcgcacaacaaactaatgtttttgctttatcattttcatctattattcacctgcttggtacaatagtggaccctgcggctagctggaagccttggctggtgaacattgcattcattttattggttcttctatttttaaatctcactataaaagaaaatcaacagaacaagtagcggcatgcccttctcaaagagaagggcatatattttatattatgaacatcggtaagagtagccttaataaacgtcactctaattctgcatctgaatatcggagcttgctattgcccgtaatctctttcaacggccagtgcgtcagcaaatggcattaaaaccgcaagacctaaatttgattctttgtgaaaaatgggggattttaaaaagatggtcaaaaaaattgtaaatggattcaattcattttcactactggggacaatcttttttatcggcagttattttacgtacaaatttaatggcgtggagctggtcgggttcctgtacttaggtattatttttttgacagctctgatcgcaaccaccgtaatgttaatcaggctaaaaagaaaaggaatcaataaagataaacaggcttaatgcatgctttatacttattttagcttctctccgctagtgtaaccttttccaatccataatatagatctcttaaaagcatcacatgtccagtacatcaaatgtaatctcctgttcatactaatatcgggaggtacatcgacttatgttgaaaatttggatgactggacttttactattagcgcagcccgcggggcattctgacagcttaacgatcactcagcaagggaagaaagtggccgttgtgaaccgcgaagattttacaatgccgcttcccggaacaccgatgattgatgataaaaaatacaacgaattcgttgacaggcttgaacggaaagtacacaaggatcctgtcaacgccgtgatcaacgatcagggaaggatcgttcccggcaaggttggctacagcctttcccggaaggggtttaaggagcagttttacgcgtatttttatggggatggcccgtccacaatagaagtgcctgaattgaatgtttacccgaaagttgacagcgaactgctttcccatatccggacacagcggatcggccagtatgtgacgtactttaattccgggaataaaagcaggacgcacaatatttctctcgcggcaaaggcaatcgacaatcatgttgtttttcctaatgagacgttttcatttaacaaagttgtcggaatgaggacgccggacaagggatatatgaaggctcccgtgattgtgagaggcgaattgtctgaaggagtgggcggaggcatttgccaggtttcgtcgacattgtttaatgctgttgaccgggcaggactcgaaatcgtccagcgctattcccacagccggcgtgtcccttatgttccgccggggcgcgacgcgacggtcagctggggcggacctgatttgcgctttcaaaacaaatataaccagccggtcttgatccgggcgaaacggcacgggggaacgatggttgtgacgctttattcttctgttgtggtcaatcatcagctgcgaaaagtcccgaaggctccggcccaaattccaaaagaagagcatcaaagcggggatcactaaaggcgaatgttcatctggcgctgcacttgttcacacaatgtacaataaaatccttttgcctgtatgataggatgaatcaaggacatctttaaatttcagacaagaggagatgatcgagtgacatggctttttgtaacctttttggtgatcttcagtctttttaaaatattggtcacttgccttccgagcggtgtcgtagagtggctgaccggcaaatttcaagttcatgtgaagcttgaggaatcgaatgttcaagtgacattcggcggaaaacgtttagagggatctgacaagagtcgatttattcaaaactttaatgaagcggtatttatggagcggtactacatatacccgggagatgagccgctgtatgtcaatccgaaaaacgccgggacaccgtttgtgatcgaaacaactaaaggaaaaaacgctgtgaagctgtttgtatacagatacgatgatcatatagacgtcgttaaacaatataagaaaaagacggccgcttattgtctgcgttctgacagtctgcaaacatgcggggggatgaaaacggcggatttgatttaaaaagcaggaaaaacctgcttttttattatgatatgaaatagagcctgacagcgccgtaaccgatcaaaaataaccaggcagcgattctttctttttgacgtgctgtacggctgtccatttcaccatcgcctttcttcattttattagcaataaaatccttgtattgcatattattctaaattaaaatgaggttgataaaaagtcttgcacagggagaaacgccatgaccatacatattcaacagcttgaatcccctctgaatcgtgagtttgttgatgaactgatcaatttgtggaatgataatacgttggaaacggctgattgtgcattagatgatcaagatagagaaatgatacaccagcagctggaacaatatgttcaatccgcatacggagcggtttttgccgtcgtgaatgagaagcaagaagcggtcggatacgggctggcctctattaagaaagatttggtcagcgattgtctgagcgggcaaatcgatgaagtgtacatagccccggactatcgaagaaatagctggggaagcttgttgcagaccgtatgatggattggtttgaacaacatcaagtctctcacgttcaagtatcggtcgatatcgataatcaatcggcgctgcatttttgggaaggcatcggcttcagcagtgatttttatcttctgacaaattagttttttgaatcaagtgggagcggccttcgttgtcatgcccggccgcctagctaaaaagccccttttaaggggcttttttgatgagctcaggagaattatgatgcggtgaattgacgagaggcgcgacttcatacgcttccatctcttttgacgcatatggttttaaaaggctttctaagtatgcaaggttttgattcttcggattcagccattctttttcagcctggcgatcaagaatgacgggcatgcgctcatgaatgtctttcattaaatcgttgggcgttgtcgtaatgattgtgcatgtatagacgggcttgccgcctgcaggctgccacttctcccaaagcccagcaaatgaaaacagtcgatttgttttgagcttgatcctcatcggccgctttgtccttgcatcggtccgcttccactcataaaaactgtctgccggaatgaggcacctttgtctgatcagcggctttcgaaagctcggcttctccgccaaagtctcagcgcgcgcattgatcattttataaccgattttctcatcctttgaccacggcggaatcaatccccaccgcagccgccctagccggttatgcgaaccgtcgttgatgacggcgagaatatactgggaaggcgcgatgttataactggggctgtaatcttcaatcgccatttgatcaatctcgaaacggtcaataatctcatcaaattcagaaaagagcgtaaacctgccgcacatcttaggtcacctttttttgtttattgaaagtttgaggcttttatatataaatggccaacaaggccgctgaaacagccatgataaagcagtcatcgcccgtcatggccacgccgtttttgatgaatacactgcaggtccagttgagtgccgatccttccgcggtccggtcaatcagttttttacccgctgtgtaaacacatgctttaaataaagaaaacgaaatggaacataaaataaagagcaaaataaactttaccatcaacaccagcattgccttttcaccccggcatattttgtaagctccaccttcattttaccaataaattcatctgttaaaacctctttcttgttttattatattgaccgaatggtcagcaatcgttgcaatttatactaaccgattggtcaataacgaaaaggaatgatggtcaatgcctttacagctttatgaaaaagagcaaatactcgatgcctgtttggaggtttttgcccggcatggctttgcaaagacttcgaccggaatgctggcggaagcggccggcatttcaaaggcgctgatttttcatcattttaaaagcaaaaaagatctgtacttaactgtgctcgattattgtattgagaaggtaaagtcgcgcctttcccttgatgacctggcgtcttatgatgatttctttgaagcgaaagaaaaaataagcatggctaagcttgagtttttcgcggattatccaaatgtatacaagctcacaaaagatgccttttattcaccgccttccgaattaaaaaaagaaatcgctgcaaagtatggggagcaatttgccgttagaaatcgtattctaaaacagctttttgcgaaagttccgttgagggaaggagtggatcgtgaagaggcgttcgaacttatcatggtcatgatggggcattttgaacaaaagtttctagcggaagtaacggctgaggacgattttgatccagcctggagcagacgtcttcttgaagaacgaaaacggtttttggatatgattcgtttcggcattgaaggcgaataaaaagggggattcctgatgggacactatgtattgggctttcatgagatcgatcgaaccgatttgccgcttgtcggaggaaaagggctgaacttgggcgaattgtcaaaaatggacggcatccaagtgcctcccggtttttgtataacaacaaaagcatatgaaaagatgatcggtgaaaacgataaggtcagtgaactgattgatcagctgtctcttttaaaagtgaaggacagagaacagattaacgatcttgcccttcagatccgcaatggtattgaaagggccgaaatcgccgaagagatcaaagaagcggttaaaagcgctcactcaaatgctggcggcgatgcatatgcggtccgatcaagcgctacggcagaagatttgcctcatgcctctttcgccgggcagcaagatacgtatttaaatataaaaggaatagaggcgatcttgaagcatatcagcaaatgctgggcttcactgtttacagagcgggccgtgatctaccggattcaaaacggttttgaccaccgcaaagttcaattatcggtcgtcgtccagcagatggtgttcccggatgcgtccggcattttgtttacggcagatcctattacatccaaccggaaggtcacctcgattgatgcaagctttgctttgggagaggcgcttgtatctggtacagtttcagcagacaactacaaggttcgtgaaggcgcgatcattcaaaaaacgatttccgagaaaaagacggcagtctattctttggaaagcggcggcactgaggcgcgcgaagtcgaagcgggctgccggaaagagcaaacattaacagatgaacagatcatccggcttgaaaaactgggaaggagaatcgaagcccatttcagttttccgcaggatattgaatggtgtctggctgatggcgaatttttctttgtccagagccggcctataacgacattgtttcctcttccgaaacagagcgatgacaagcttcgcgtctatatgtctgtcgggcatcagcaaatgatgacagaaccgatcaagccgcttggaatatcgtttttcgggttgatctcggattatgagctgacttgtgccggcggaaggctttttattgatttatcacacgatttggcatcttttgcagggcggaaagtcgtcctcagtacggcggggaaaaatgatcctttcatgcatagcgctcttgtgaattttttgaaaagaaaggagcttgtcaaaaccctgccgaaagggaagcggatgtttagattaggggctgaagggctgtcatggtcgctgccgggtgatgcgcttaagatttaccggaaaaacgacacaggtgtagtcaaacggctcatgtcgaaagcggaagcatccattcaagaggctgaacagcgattgaaaaacgcatcgggtgaaacgttatttgcacagatagaagaggatcaaaaaagcttgaaaaaagttctctatgattcagagagcatggctgtaattatggttggtttatatgccgtttactggctcaatcgaaaaatggagaaatggcttggcgaaaaaaatgtcgccgataccctttctcaatcggtattgtacaatgtcacatctgaaatgggattggcgcttttggatgtatcagatgctgccagaggataccccgaggttcagaagtatttagcatatgccaataatgaaaccttttttgaagatctcaaacagcttgacggcggtcccgcctttatcggcgcattgcgggcattccttgagaagtacggcatgcgctgcaccggtgagatcgatataaccaagacccgctggagcgaacgtccttccattcttgctccaatcattttaagcaacatcaagaattttgagcccggcgcgcgaacggctaagtttgaacaggggcgattggaagcggagaaaaaggagagggatttgttaagccgtctgcaacaactaaagggaggcagacaaaaggcaaaaaggacaaagaagatgatcagcgtgctgcggaattttatcggctatcgggaatatcccaaatatgctctgatcaaacgctatttcatatataaggaagcgttgatgaaagaagccgctgttttacagcaaaagaagctgatacaagcgaaggaggatatttattatttgtcctttgatgaattgaaagaagccgtgtgcacaaaccgtctcgatgtgaagaagatcgaggaaagaaaagcggaatatcggcattatgaaaaattgacgcctccgcgaatcatgacttcagaaggcgaggtcatcaccggagaagccttgggggatcacattccggcaggagcgttggcgggcgttcctgtttcatcggggatcatcgaaggaagggcaagagtgattctgaaattggaggaagccgatatcgaagagggggatatccttgtcacgccttttacagatccgagctggacaccgttatttgtctcaatcaaaggtttggtgactgaagtgggcggcctcatgacacacggcgctgttattgcgcgggaatacgggcttccggcggtggtgggggttgagcatgcgacgaaagaaattaaagacggacagaagatcaggattaacggatcggaaggatatgttgaaatactcgaatgataaaaagcgcagctagaagcttgcgctttaatttttataaaggtcggcggacaacatccaatccatcaattgctgatacggataataggtcgtgccatttaattcaattttaggtatgtcaggatatttacgcagcatttctttcgtttctactttgctcaagcctaaataataatgtaaatcgtcttctttgattaaatagggatagcctgaataaattccctttgggtttttaaagtttttcaagccgtcaccgataaaatagcctaaagccgctaaaccaagtccgatccaaaacaggttcatctccacgtttaccatccttttctcatattgctttatctgtcatacgaaaaggattgaaaaaagtttcaaggtcaaaggctttgccggttcagcatctcataaagaacgacggcatggttatggcgctcatctttggccccgtaaagcagaataacggtttcgtccgccgccattttttttaattccctgaagcttttctgtttttcagcgttttgtttaatttcgttttgataggcttctttaaacgattcgaattttttcggatcatgaccgaaccattttcttaattcggggcttggagcgatttctttcatccagcagtcggggttcgctttttcttttgatatgccgcgcggccacacacgatcgattaaaatgcggcgtccttctgtttgctggttttcttgataaatgcgctggagaataaacggcatgcggatcactccttctcattttatgataaaacggcaggctggaaggaacaaccctattgaaaaagacaatgccaacattccgtttattcgatggaatgttttaaagaactgtacaattggctgacgctttcatcgatttcatctcttgacatccgcaaggctttttccgatacggcatagccgatttccaaccggccttcttccagccctttaaagatcgcatcggcaaattcatccaaaggagctccggaatcatgcagtccgacaccgcccagatccgtattgaccgcaggaggagcgacttctatgacctcaacgccggcctcggaaagctggtgtcttaaactcatcgtaaaggagtggagagcggcttttgtcgatgagtagattggtgcgaccgccatcggtgtaaacgccagccctgatgacacattgatgatcgcagttttcccggctttttcggcaaagtatcggctaaagagcatggccagatggataggcgcctccatattgacggtgatttctttattgtagtcagcccaattgtctataacatcggcttttaaaatgtggtagcgctgctgtatgcccgcattattcacaagtacgtttactcccggatgatgttctttgatccattcaaataatgccagtcgttccgtttcaacggccacatcgcatacacgcgtgatcagctccggatgtttttcctttgcttctttaagcttgctttcccttctcccgcagacgataacggtatttcccgcttttataaatcgttcggcaaaagcaaagccgattcccgatgcgccgcctgtgatcagcactgtgtttcccgacagttccatattggaaccctcttttccgtcaaattttaaacaataggttgagcatctcttctgaccctataatgcccctttattttccaaaatgcaagtattctgattagacggtatgttccgattccattatcattgaaaagtgaaaggggtggaataaaatgtatgatacaactgtcgaaacacgcttcggaaagctgaaaggcagagcggaaaacggagtccgtatctttaaaggcgttccatacgcaaaacctcccgtcggcgacctaaggtttcgggaaccgcagcgaatggaggcctgggaaggtgagctggatgcttttcaatttggcccggtttgtccgcagcctgatggggtattgcctgagtcagcgggggttcaaaagtctgaggattgcctttatttaaatgtgtacgcacccgaagaggcggacggggatctgcctgttatggtgtggattcatgggggcgctttttatctcggcgccggaagtgaaccgctctatgacgggactcagcttgcaaagcagggaaaggtgatcgtggtcaccatcaattatcgcctcggtccgttcggttttttgcatctatcctcaattgatgattcctacagcagcaatcttggcctgctggatcaaatcgcggctctcgagtgggtgaaagacaatatcgctttctttggcggagaccgtcatcacattacggtttttggagagtcggcgggatcgatgagcatcgcttcgcttttggcgatgccgaaagcaaaggggctttttcaacaggccattatggaaagcggggcttccgcaactatgtccgataagcttgcgaaagctgcagcagaaagattcttaaggattctcgatattgatcatcatcatctggagcgccttcatgatgtatctgatcaagaacttcttgaagccgccgatcagctgcgcactttaatgggagaaaatatttttgaattgatttttctgcctgcgcttgacgaaaaaaccttgccgctgaagccggaggtcgccgtcgcaaaaggcgcggcaaaagagatcaatctattaatcggaacaaaccgtgatgaaggcgtcttgttttttccctctgattcggatcttttgcctgagagcaagatcaacgagattttagaagaatacatgggtaaagaggccgccgaagccgcctcctctctgtatccgaggtcattggaaggccatgttgatatgatgacagatctgatcttttggcatccgtctgttgtgttcgcttcggctcaatcacgatatgcatctgtctttatgtaccggtttgactggcatgcggattcagagcagccgccgttcaacaaagctgcgcacggcttagagattccgtttgtatttggaaatatggacattttggaacagctgacaggtacgaaggccggtgaagaagcgcagctgcttgctgaacagatccaggctgcctgggtgtcttttgcccgatccggaaatccgagcaccgatgatgtcagctggcctgattatgatgaagattcacggaaaacgctgatttttgatcaagaggtcgcagttgaaagcgatccttattcagataagagaaagatgttgacagccccgaacccgcagatttagaacaagcggccctgacctgtgtggtcagccgctttgatgatagcgttcgctttgaatggcttcaagcgatttgccgcgcgtttccggcgccatacggagcccgatgatcatatgaatgacgagaaatgcaatcatgacggcgccggctgttttgaagcccaagcccgtaatcatcgccggaacgaccaatgagatgagtccgacgccgatgcggacgatgaagaacatgaagccttgagcgagcgccctgtatttcgtatgaaacagctctgccgcccacagtccgtaaaacgcctgcgctccaaaacccgcagaaatgccccacaggcatacgaataataaaagctccgtgatgttcatcgtgccgaaggtgaggatgacccatgcggcggttgccatagctgctcctatgccaaaaagcaacttccgattgactttatcgccgagacggataaagacgaagtatgtggacgccacagtcaaaatccataaaaatgcctgcagcaggttggcttgtgccgctgttaggccgccgaccgtctcatagatatacggcatgaaatatcccatcgtcccggcaacaaggttccaaaacgcataaattccgatgaggagaatcatcgcgcgaaggttcgctttgttggtcaacagctctttgatcgacgccttttcttcaactccttttgctttgtcttcggcttcttttcgcttttgctcctcccagatggacgattcgtgaatctgctgctgcaaaatccaggtgatgactgcgacgacgaataattgggcaaaaatcaaccggcttcccattaaaccgagcggcgccaaggcaactgataacagcagcgtaagcgccggtccgaccgaccatgccagctgcccccagccgacgcgtccggcccgttcatggtcaggggcctcctcggcaatgtaagtccaagcagccggaattgctgcgcccaccgcaattcccgtcacgatgtatccggttaaaagcatgggaaaattaaacgacgcggcgatcagtaaaacgccaagcatatagactaatagatcgtatttatatatgaattttctcccgtaacggtcgactaaaaaaccgccgagaaaagcgccgatcgccgcgccgaaaccatttgcgcttaaggcgccgagaagtccgacccgggcgtcgtccaatcctaaatattcaacccataacgaaagcccgccggcccccgcgacgatggatcccgcctccaaatagttggacatggcgaccgtaatcgtcgacttcaaactgcctttttttctccctggcatgattcgttcccctttcaaatcagaattcttttctgacagaagccggattgatgcgttgaatgctcgattttaccctagcgagtcatgcaaaattgtaagcgttatcatctcgtggtaatcccgaccctgcatccgttccagccttcaggctgttccgaatgttttgcttatagtattactttattcggaaaacaaaaataaatcaacataaaaatcagaatattccgtctgaatatttttgtttttgtttggatttttttctcgaaaaactgccattatatcaattttttattaaaaaaccgaaacttttcctctggaaaatagtatatttaaactaagtatattttactataaggaggaatttcttagatgagtatattaagcaggttcaaagacattatggccagcaatattaacgctttgctggataaagcggagaacacggaaaaaatggtggatcagtatgtcaggaacttaaacagcgacttaaacaaagtaaaggcggaaacggcgtccgtcatggcggccgagcaaagggcaaaaagagaactggcggattgccgggcggaaatcgacaagcttgagcgctatgcaatgaaggctttggaagccggcagcgaggcggatgcccgaacatttttagaaaagaaagcggtgcttgaaacgaaggcatccgagttagaaaccgcgtttcaaacggcgtcatccaatgcgaatcaaatgaaaaaaatgcacgataagctcgtttccgatatcggggagcttgaagcacgccgcgccgcgatcaaagcgaaatggacagcggcgaaaacacaggaaagaatgaataaactcggtgcatctgcagcgaatgccaaccattcaatgtccgctttcggcagaatggaagaaaaggcaaaccgggcgcttgatgaagcgaatgcgatggctgaattgaacgccgctcctcaagatgacatagaagacctgaaggctaaatatgacagcccttctaatgtggatgatgcgcttgccgcattgaaagcgaaaatggcgggtcaaaagtcatagcatttgaaatgaataaagtgagaggttaagagacatggtaatttcttataaatgtccgggctgcggggatgacatggcctttgacgctgaatcgggcacgctcgcctgccgcagctgcgggagacaggacaagattgaaaacattccggaagaattgaaaactgcgagatttactgaagatgaagcaacagaatatcattgccaaaactgcggcgctattttgatcactgagaaagaaacgacggctacatcctgcagcttttgcggaggagcggcagtgatcgccgaccgcctgtccggaagccttgctccggcaaaggtcattccttttacgatcagcaaagaggaggcggcggacgcgtttcgcaagtggtgcagaaaagggctgctcacaccaaagggctttatgtcggctgaccggattaaaagcattacaggcatgtacgtccctttctggatgtacgatttaaacagcaaagtgcaggtcagcgcccgctgcacaaaggtacataggtatatacagggcgactatatctacacggagaccgaacattatgatgcgtttcgcgatatcaatctcgactacatcaaagtcccggtggatgcctcagaaaagatgaacgatcaattgatggacaaattggagccatatccatatgatcagctgaaagattttaaaacggcctatttggcaggctacatcgctgaaaaatataattacgatgatgaagagctttttccgcgggcgaaaagcaaaatcagcggctacatcgagtcatatatcgattccaccctgtccgggtacagctcagtcgatgtgaaaacgaaacacgtcgatacacaaaaagtgaaaagcttgtatgtgcttttgcccgtctggatggtcaattacaactacaaacaaaaggattacatctttgccatgaacggacaaacgggaaaagtcgtcggcaagccgccgatcagctcatttaaagaaaaaatgtggttcagcgggctggccgtctccatatttgcactctggaaaatcattgctgctgtaatgggaggcggggcgtgatgagaagtttattgagaagcgcgatgatcttatgtatgattttccttgtcttcatccctatagcctccggtgcggcagcctctgaacagaagcggtttgtttatgatgaagccgggcttctgaccaaacaggaaatcgagaagctggaaacgctggcagccaaattgggcgccgaacgggagaccgactttatcattgtgacgaccaatgatacaaacggccgcgatgtaaagaaatatgcggaggacttctatgacgaaaaagcgcccggctaccagaagaagcacggaaatgcagccgtattaacggtagatatggagcatagagaagtctatcttgccggctttaaaaaggctgaagaatatttgaatgacgccaggctggacaaaattagagaaaaaatcacgccggatatatcccacaagcattatgaggccgcattcgaaatgtttatgaaggcggcgcatgatgatatggagaagaaaccgtgggcggacagcatcttttttaagacgtggtttcaattgcttgtttcggcagtcatcgcgggaattgccgtcgccattatgaaatacaattcaggcggcaaagtgacagtaagtgcaagcacttatatgaacggtgatacgtccggagtgatcagaaataatgacgaatacatcagaacgaccgtcacaaaacagagaaaaccgtccaataataaaagctcaggcggcggaacgacgagcggaggccattcgcacagcggcagccggggaagcttttagaaagggaaaggaagagcttaaatggtgttttttagaaatcaatttgcaaatgtagtagagtgggatgaatttcgcgatgatatgattttctataaatggaacaaccgcgaaatcaaaaaggggagccggctgatcattcgccccggtcaggatgccgtctttttaaacaacggaaaaattgaaggcattttccaggatgagggcgactatgatattgaatccgaaattattccttttttatccactttaaaaggttttaaatttggctttaacagcgggatgcgcgccgaagtcctgtttgtcaacacgaaggaatttaccgtcaagtgggggacgaagaatgccatcaatatcccggctgcaggacttccgggcggcatgccgatcagggcgaacggaacatttaactttaaggtgaatgattatgtcgcattaatcgataaaattgccggtgtgaaagatcagtatgttgtggaagatatcaaaatacggatcacatccattctcgatcagcttctgatgaagtggatcacaaaagaaggaaaagatatgttcaaccttcaagccaacgcctttgatatcgcaaagggaatcaaggaagatcttgatatggagattgtcggcgacggcatgacgataacaggctttaacatcatgagtttcaattatccgaaagaagtccaggacatgatcacgaaaaacgcttcccacggcatggtcggcgatctgaacagatatcagcagatttcaatgacagacggcatggcttcaggaaagatgacaggcggcggtgccgcatctgacatggccggcatgatgatggggatgaacgtggcgaaccaaatgatgaatcagatgaaccaaaatcagcaggcgcaaacacagacgccaccaagcgcgccgcagccagcggcaaaaccgaacttctgtccaaactgcggaacgaaaacgggcgaagccaatttctgtccgaactgcggtcagaagctagtgtaagcggggggatcggttgatgccggcaaagttggtatcttctatgtgaatgagggctttcgctgccggcacgatcgccggcataccaagccggaaactgatggaacagaagctgatcctgatacacaagtcggattaattgcgtgatcagagcgcccgccgtattctatatataacaatgatgtcggatgaaaagaatgcggcatacatcaatcaaggatgtacagaataatcaaaggaaacaatctggaggaaaagcgacatggaattaggcatcagcacctttgtagaaacgacccctgatatcaaaaccggaaaagtcatcagccatgcggagcggctgcgcgaagtagtggaggagatcgtccttgccgatcaggtgggcttggatgtattcggagttggagagcatcatcgtcaagattacgcagcttcttctcctgccgtcgtcctggccgcagcagcttcacagacgaagcgcatcagattaacgagcgcggtcaccgtgctgtcgtcggctgatcccgtccgtgtttttcaggattttgcgacgctcgacgggatttcaaacggcagggcggaaatcatggcgggcagggggtctttcatcgaatcctttccgctgtttggatatgatttagacgattatgatgagctctttgaagaaaagcttgatttgctgctcgaactgcaaaagtcggaaagggtcacatggagcggcaagcatcgcccggctattcacaatacaggcgtttacccgcgtcccgtgcagaagccgctgcctgtatggatcggaagcggcggaaaccaggaatccgtcgttcgcgccggcctgctcggcctgccgctggttctcgcgatcatcggcgggagtccgcagcactttgccccgcttgttgagctttattacaaagcagcggaacatgcagggcatgacgcctcaaagctgattgtcgcttcccattcccacggctttatcgcggaggataccgagacggccgccgatcgttttttcccttccacccagcaggccatgaatacgctcgcaagagagcggggctgggggccgtacagccggtcgagcttcgatgcagccagaagctttgaaggggcgctctatgtaggcgatcctgagacggtggcggaaaaaattattcatctgcgcaagaatgtcgggatcacccgatttttgcttcacgttccggtcggttcgatgccgcacgaagatgtcatgaaggcgattgaactttttggaacaaaaacggcgccgctcgtcagggaagaagtatcccgctgggaggcatccgaaaggtcataacatgaaaggcccgcgctttagcgcaggcctttttatttcatataatgctttttaaaatccggatgtatcgaaaatttgcggcgcaaatggatcaggttttcgccgaaactttcctccaatacctctctgtgcttctccatgatttccatcaggtacaaatcatgaatcatcacttcggtaatcggcatcaccaagcctacatgcatcgtccaggctgcgcggctgtctttcccatgcgagacaatgccggccacaacttctgaatcgtcgacgctgaatacgagccagcgtccgtcatactcttctgtaatttgcctgctgttgtcatgtagatagacattggcgaaatccgcttcaatgtcgccgtatgcaataatggtcacaatgacgcctttttttgcggcccgcttgagctcaggctccaattcaggaaaatcctctttccaaatttccaggagaatcctttttccggccgatgatatgcacgcctttactttatcgagaatctcgcttcgcccggtgatgttccaaatattttcccggtcatttgcagtgcgctcaaacttctcgaaatatttttctgcctgttcaaaagtctcttccgctttcatccgccggtttttaatcaggtccttggcgggaacgggaatgtactgcggtgtgttgccgtagctgacaaatatatcgccgcggattacaaggctctccagcacttcgtatattttcgaccggggaacacccgatttttttgccaccgcatagcctgtcagcggcgattcttccaagagcgccaagtatgctttcgattcatactcggtgaaattcaggtttttcagtacgtctaatatgttttccttcataagccctccagcttcaacaagagtcgctacctttgtcactcatattttgctggatgtattgatttatttcaagtccgctgatacactttttataagtggttacttgagtagtcactatataaaaacagtatggggggagacatctgatggatagcctgctgtcatacatatcgattgcagccatgatggtggtgatacccggagccgatacgatgcttgtggtgaaaaacacgcttcgatacggtccgaacgccgggcgctgcaatgttctcggcttggcgacggggctttctttctggacgctgattgccgttctcggcttagcggtggtgattgcgaaatcggtgattctgttcaatacgatcaaatacttgggggcggcctatttaatatatttaggcattaaaagctttttcgcgaaaaaaatgttttctttggaagagatacaagccgagaagaacaaaaacgaaaacgcatcaagccggcattataaggattcttttatgcaaggattgttcagcaacattctgaatccgaaaactgttttggtctatatcacgattatgcctcaatttattaacttaagagaaagcgtcaaccagcagttgatcatcctcgctttaatccttacttttcttgctgtgttttggttcctcatcctcgtatatttgatcgatttcgcaaagaaatggctgagaagcgtgaaattccagaagatctttcaaaaagctgcgggtctggtgcttgtcggatttggcgttaaaacgggtttagattgatattggagaacgagtgagcgctttggctcactttttttgtttatttgtcaacgattatttgatagaaaacactagatgaaataagagtgctatggttattcgttgacattttgacaacgattctatatatttataccgacttggtctttgggctgatagattgatacatttttagcgtgggaggagaaaagctcgtggatgaacaaaagaaaaatcagctgggagtgctgctgaaagagcagttgcgaaaacgatcattatctttaagagaattgagcgaacgcactcaaatcgataaagcgaccatctcaagaatcatcaatggcaaaagaaaagcaaacctgaaccatttgcaaaggttttcagaaagcttcggcgtttcttttgatgagctgatgacagcggccggctatgcgatggagaagacgcaggaaagcgaacgtccggatattcactcgtcagttgccgaaattgaagatgttttgcaaacctcaaatgtctatgatcggccatttaccatggaagaactgaaaaacaaattgaatgagtgcgaacaatattctcagacggaggaaggaaagcgtaccattctggctgagtttgaatctaaaatcgagaaagttgccggcattggtccttttctgacccgtctgcacgacatgtacagcagatttacctcggggcgggggacgccgcgtgaattgctgctgatgggcggcgctttgctgtatttcatcgtttctgttgatgtcataccggattatatttttccgatcggctatatcgatgatgcggcagcggttcatttcgttttcaaccagctgtcatataaatcatgatggagcatgttcaagatgaaaagaaagcatatcaacattgacatcagtctgctgctcattctattttgtttgtttatcatcagcctgctggccgtttacagcgggtcgggccagtatgaaacacaggaccctttttattttgccaaacggcaggtcttttggtatcttgtcgggtttggcgtcatggcgggaacggcctacatcgactatgagctgcttgaacgattggcgcttcgtttatttgtgggagccgtttttcttctgattctcgttcatttttttggaacttacaaaaacggttcgcaaaggtggatcagcttcggggtcatcgaaatccagccttcagaatttatgaagatcattttgattcttctgctggcttcgatactcaatcaatttcagcataaaaggttctccttcgccgagagcatcattccgacgggaaaaatcatgatgtacacggtgattccgtttttctttatattggttcagccagatttagggtccgcattggtgattttatcgatcgcattcacgttgatgctggtctcggggatttcgggcaggatgatcgtgtccctgtcacttggattcatggcattggttgcctttttgacgtatttgcacaatcattactttgagatattttcaaagattattaagcctcaccagcttgaccggatatatggctggctcagtcctcatgaacatgcctctacatatggataccagctgacgcaggcgttattggggatcggatcaggccagctgtcagggagcggctttactcaaggaatccaagttcagggagggaaaattccggaggctcatactgattttattttcgccgtgattggtgaggaattcggttttttgggtgccgtaacattagtctgtctgtattttctgatgatctacagaatcatcaggattgcgctttcgtccaacagtctgttcggtctttatatatgtgcgggggttgcagggttgattgtattccaagtgttccaaaatatcgggatgacgatcgggttaatgccgatcacggggctcgctcttccgtttatcagctatggcggcagcgcgctgttgaccaacatgatcgctttaggtctcgttttcagtgtgaatatcagatctaaacattacatgtttgggaatgattggggatgaagttgctcaaaatgattctttcccatctaaagaaacttgattatgtattgattgccgcggttctgtttttatctgcgtttggcttgctgatggtatacagcgccggctaccccctcggatatatgaagtatcatgatggcagctatttttttatgaagcagctgcaatggctgctcatcggtttggcctttttttcggctgccgccattttcccatacaaagcttacagcaaactcattcggtttttggtgaagctttcttttttaatgctgattctcgttttgctgccgggaatcgggatggagaaaaacaattcccaaaggtggattcaattcggttcgctcatgattcagccgtctgaggctgtgaagcttgtgatggttatttatttcgcctatgtgtatgcaaaaaagcagaaatacatcgccgatttcggaaagggcgtcatgccgccgctgctgattttggcggctgtgttttttttgattttaaaacagcctgacttgggcaccgccgtttccatcctgttaagctgcggagcggttctgttgtgcgccggcctcagaatgcggcacttgctgcttctcggaacaatggcaggggctggcatcgcatattttgcaataacagcgccgtaccggttaaaaaggctgacatcgttcagcgatccttttcaaaatgaaaacggagacggctaccagttgatcaattcctaccttgccattgattcgggcgggttatgggggaatggattggggaacagcgttcaaaagctgggatttcttcccgaagcccatacggactttatcatggcggtcatcactgaagaactcggcggtatcgggctggcggtgatcatctgggcttacctgttgatcatgttcagaggggttcggatcgctgtgaaaatcgatgatccgtttggaaagctgctggcggtcggccttactttccagatcatgattcaagcgttatttaacctgggcgctgttttcggccttcttcccattaccggaattcctcttccgtttgtcagctacggaggttcttcgttattgttcatgctgacgacagccgggatattggtcaacctctcatcacatgttaagcggggagttaaaaaagatgtggcctttcttttgtagagagtcttttcttaactttgaagtggagaattttatctcaaagttacgattgttgatcttgtcttctcatatcgaatttgaccgggacgtgtttatacatataaatgcgttcatattgataaataaaggaaatcatgatatattcaaggtgtatgaaacagaataatctctttatatgaatgcataaactaaaaaagaccggaagatgcggcaacatctcccggaagcaacagagaggctccataaaaaggagtcggctctatttttagatcccaattaaaaagtaagatcgtcttggtgtgggaatcaagggcgatcttacttttttttgtcgtttgatgacagaatggccactacgagaatgccgaaagacaccatgagttgcaaggcctctgatactgtcacatgctcaccccctttctcttcaagagatggaggatgagccgaccgcccttatatagaaccgaactgctgccaacccttattataccaaaaagcagagttgtttccataaatgtccgttgacatgcaaatttgaaaaaccgcagttttcttaaaacgttctgcggtcaaactgagtaaatgctgttttttcttagccggaaccctgctcattcctttagcagctgatctagtgcaaaacaggccggttcattaaaacccggcctgtttgaaatatattgttcatttatgcgggacgcgcggcaaaaatttggaaggcaacgccgaacggatcagtgacaatgccgtatgcgggactgaaataagtttccttcagctcaagcttgacctcgccccgctcgctcagcttgccgaaaagccgcttggccgaagaaacatcggctgccgttacgcaaatggacaattggtttccgctttggaaaggcagttcaggaataatgtcggcgatcatcaggacagcgtcgccgattgtcaaaacggcatgtgcgatgaaatccaattcgtcttccttaaagttcgctgcctcatctgcggggccttcaccaatcgtctgactgaactttacttcggcatcgagtacatcacggtaataatcaatcgcttcctttgctcttccattcatcaggatataaggtgtgaatcgcgttttcatagggggaacatctcctttttttgttgatctaaggagattgtatattataatggtgacaactaatgtcgtggttaaaaaataattggaggtattcatgtctaaagcgaaacgattgaatgaaatgatcatgatggtaaaccggaaaaaacgatttacggtcggggagctggcgcgggaattcggggtttcaaagagaacggttttaagggatttgcaagagctcagcgaaatgggggtgcccctctattctgaaaccggcccccacggaggatatcaggtgttaaatgaaaggattcttcctcccatcgccttcagcgagaacgaagcgatctcaatcttctttgcgatcgatgcactgaagcattatatatccctgccgtttgatgcccagtacgcatccatcaaaaagaaattttatttaaacctttcaggagatatccgggatgcgattgacagtatgaaggaccgcgttgctttttatacgccttatgagcaaacagacgacattccggttttaaaggtgctgcttgaggcagcggttcagcaaaaggtgttgatcatcgagtatgaagcaaatggcgcatcaagcaagaggagcattcagccgatcggaatctatgccaatcaagggaagtggtattgcccggcttactgttttttaagaaaggattaccgcatattcaggtgcgaccggatcaagcgggccgagcttgatgaacataaggcaccgattgatttgtccggcctcaatttaaagaaccgtttttcggctttgtcccggccaagggagacattggaattatccgccgagctgacaaaaaagggagtagagcggcacggttcactcaaatggccgcaccttgaactgcatgtaagagaagatgggtccggcgtgctgaaaggcgaaatcgcgccgaaggatatcgatttttttgcggattatttcatttcgttcggccgggaagcggttattcagaagccttccaaattaattgaaaggatgaaacggacattatccgacatgctgaaacaatacggctgaaatgaagactccggtataccgcagcctgcgtttttctgcatttaaagttccgcaaaaaacgcgtgaagacgcatgtcttcttcatcctccagttaaagacactctcaggaatcgagagtgtcttatttttgccgtcagaagaaatttttacccaaaaaagttgacggcagatttaaaagtgagtatcattacaaatatgatattaatattacatttttgttacaaaagaaaatgatatgttacgagtttaaaagaagattgacaaaggagcatgcttatgaaaaaagcgatggctattttaggattccttgtactcacagcatcgctgctatttatcatcaataaaggaacatctcaaataaacgcttcacaaaatagaaaagccgcggttcacacggagtattacaaagacatcagttcgctttcttttccggtattcagcgatttgaaggaagaggatgccaagctggccaacgatgcggtaaaacttcatttaaaaaattcctataaagaatttcaaaaaatcgttaatgatgccgaaaagaaggataaggatgaagaaaacgtttatgaaacgtcctacaaagtcaaatacaacgaggaaggcaaactgagctttttaatctatgactatcagttctccggcggtgcgcacggcatgtacaccgtaacatcctacaactttgactttgacaagcataaacaagtcgtgctgactgacgtattaaacaatcaggcgaaaatcgaaaaggcaaaaaactatattttcagctatatcaacgaacatccggaacagttttattctgatcttaaaaagagcgatatccgtttggatgaacatacggcattctattatacaagcagcggaatttcaattgtatttcagcagtatgatatcgccccgtatgcagccggaaaccaggaaataaagcttccgtcgacgcttttatattagccccggcattagatctaatatttgtaatagaaacagagagagcaagtcatgaaacaggagagtgagcagcgatgtctggcaaaccatcatttcgatgggttaaaatgttgatttttttaacgatattaataggtttggcagggtactcttacaataaagtgtcaagcaacagccaagagccccctcagccaaaaaaagaccgcggacaatccggcctcggcgtcgaatccatggtcaatgacagcaaacaagagaggtatgccatccattatccggtgtttcacataaaagaaatcgatgaacaaataaaagattatgtgaatcaagaattggccggttttaaagaggataacgcaaaggcccaggctcaggatgaagacgggccttttgaactgaacattaaatataaggttgtctattatacaaaggatacggccagtgttgtgctgaatcaatacatagaggccggcggcgtatcgggtacaacatctgtcaagacgtttaacgctgatttaaagcagaaaaagctgctgtcccttcaagatctgtttgaagagaattcagattttctgaacaggatttcaagcattgcctatcaggaattgaaaaatcggaatccgtctgctgacatggctttattaaaagaagggacgagccctcaggaagaacatttcagccgcttcgcgcttcttgaaaacgaggtggaattttattttgagaaaaaacaaaccggtcttgaacagtctgtaaaaataaaaaaagaatgggtaaaagatattttaaaagaccgatatcaggatatgaaaaagaatcgtcttcaggccaaacctgatcaggagcctgttccgcttccgaagcaagcgaaaattaatcccgatgaaaaagtgattgccctcacatttgatgacggtccgaatcccgctacaacgaataaaatattaaacgctttacagaagcatgaagggcatgcgaccttctttgtgcttggaagcagagcgcaatattatcccgaaacgataaaacggatgctgaaggaaggaaacgaagtcggcaaccattcctgggaccatccgttattgacaaggctgtcaaacgaaaaagcgtatcaggagattaacgacacgcaagaaatgatcgaaaaaatcagcggacacctgcctgtacacttgcgtcctccatacggcgggatcaatgattccgtccgctcgctttccaatctgaaggtttcattgtgggatgttgatccggaagattggaagtacaaaaataagcaaaagattgtcaatcatgtcatgagccatgcgggagacggaaaaatcgtcttaatgcacgatatttatgcaacgtccgcagatgctgctgaagagattattaaaaagctgaaagcaaaaggctatcaattggtaactgtatctcagcttgaagaagtgaagaagcagagaggctattgaataaatgagtagaaagcgccatatcggcgcttttcttttggaagaaaatatagggaaaatggtacttgttaaaaattcggaatatttatacaatatcatatgttacacattgaaaggggaggagaatcatgaaacaacaaaaacggctttacgcccgattgctgacgctgttatttgcgctcatcttcttgctgcctcattctgcagcagcggcggcaaatcttaatgggacgctgatgcagtattttgaatggtacatgcccaatgacggccaacattggaggcgtttgcaaaacgactcggcatatttggctgaacacggtattactgccgtctggattcccccggcatataagggaacgagccaagcggatgtgggctacggtgcttacgacctttatgatttaggggagtttcatcaaaaagggacggttcggacaaagtacggcacaaaaggagagctgcaatctgcgatcaaaagtcttcattcccgcgacattaacgtttacggggatgtggtcatcaaccacaaaggcggcgctgatgcgaccgaagatgtaaccgcggttgaagtcgatcccgctgaccgcaaccgcgtaatttcaggagaacacctaattaaagcctggacacattttcattttccggggcgcggcagcacatacagcgattttaaatggcattggtaccattttgacggaaccgattgggacgagtcccgaaagctgaaccgcatctataagtttcaaggaaaggcttgggattgggaagtttccaatgaaaacggcaactatgattatttgatgtatgccgacatcgattatgaccatcctgatgtcgcagcagaaattaagagatggggcacttggtatgccaatgaactgcaattggacggtttccgtcttgatgctgtcaaacacattaaattttcttttttgcgggattgggttaatcatgtcagggaaaaaacggggaaggaaatgtttacggtagctgaatattggcagaatgacttgggcgcgctggaaaactatttgaacaaaacaaattttaatcattcagtgtttgacgtgccgcttcattatcagttccatgctgcatcgacacagggaggcggctatgatatgaggaaattgctgaacggtacggtcgtttccaagcatccgttgaaatcggttacatttgtcgataaccatgatacacagccggggcaatcgcttgagtcgactgtccaaacatggtttaagccgcttgcttacgcttttattctcacaagggaatctggataccctcaggttttctacggggatatgtacgggacgaaaggagactcccagcgcgaaattcctgccttgaaacacaaaattgaaccgatcttaaaagcgagaaaacagtatgcgtacggagcacagcatgattatttcgaccaccatgacattgtcggctggacaagggaaggcgacagctcggttgcaaattcaggtttggcggcattaataacagacggacccggtggggcaaagcgaatgtatgtcggccggcaaaacgccggtgagacatggcatgacattaccggaaaccgttcggagccggttgtcatcaattcggaaggctggggagagtttcacgtaaacggcgggtcggtttcaatttatgttcaaagatagaagagcagagaggacggatttcctgaaggaaatccgtttttttattttgcccgtcttataaatttctttgattacattttataattaattttaacaaagtgtcatcagccctcaggaaggacttgctgacagtttgaatcgcataggtaaggcggggatgaaatggcaacgttatctgatgtagcaaagaaagcaaatgtgtcgaaaatgacggtatcgcgggtgatcaatcatcctgagactgtgacggatgaattgaaaaagcttgttcattccgcaatgaaggagctcaattatataccgaactatgcagcaagagcgctcgttcaaaacagaacacaggtcgtcaagctgctcatactggaagaaatggatacaacagaaccttattatatgaatctgttaacgggaatcagccgcgagctggaccgtcatcattatgctttgcagcttgtcacaaggaaatctctcaatatcggccagtgcgacggcattattgcgacggggttgagaaaagccgattttgaagggctcatcaaggtttttgaaaagcctgtcgttgtattcgggcaaaatgaaatgggctacgattttattgatgttaacaatgaaaaaggaacctatatggcaacacgtcacgtcattggtctgggcgtccgcaatgtcgtcttttttgggatcgatttggatgagccctttgaacggtcaagggaaaaaggctaccttcaggcgatggaaggcagtctgaaaaaagcagcgattttccggatggaaaacagttcaaaaaaaagtgaagcacgcgcgcgggaagtgcttgcatcctttgacgcacctgcagcggttgtttgcgcttcggaccgaatcgcgctcggggttatccgcgcggtgcaatcgcttggtaaaagaattccggaagatgtcgcggtcaccggctatgacggggtgtttctcgaccggatcgcttcgcctcgcctgacaaccgtcagacagcctgttgttgaaatgggagaggcttgcgcgagaatcctgctgaaaaaaatcaatgaagacggagcgccgcaaggcaatcaattttttgagccggagcttattgtccgcgaatcgactttgtagggtgtctcattctgttaccgttaacaagctgaaaatgattgttcctgttaccgccgtcatgataatttcagaataaaagccggtttatcacagccggacaaccaaaagggggaaacatgatggaatatgcagcgatacatcatcagcctttcagctctgatgcctattcttacaatggacggacattgcacatcaagatccgtacaaaaaaggatgatgccgaacacgtccgcttggtttggggcgatccttacgaatacaccggcggcacatggaaagcgaacgagcttgcgatggcgaaaattgccgcaacaagcacccatgattactggtttgccgaagtggcgcctccattcaggcgtctgcaatacggatttatcctgacaggcgctgatgatcgagacactttttacggaagcaatggtgcatgtccgtttgccgggaaagcggcggatataggcaaacactgttttaaatttccgtttgttcatgaggcagacacgtttgatgcacctgactgggtcaaatcaaccgtctggtatcaaatttttccggagcgctttgccagcgggcgggaagatttgtctccggaaaacgctttgccatggggaagcaaagatcctgaggcgcacgattttttcggaggggatttgcaggggatcatggacaagctggactatttggaagacttgggggtaggcggaatctatttgacgccgatctttgccgcgccttccaaccataaatacgacacattggactattgctccatcgatccgcattttggcgatgaggagctctttcgcacgctggtcagccggattcacgagcggggaatgaaaatcatgcttgatgctgtttttaaccacattggcagcgcttcgcaagagtggcaggatgttgtcaaaaacggtgaaacgtcccgctataaagactggttccatattcattctttccctgttaaagaaggcagctatgatacatttgcgtttactcccgagatgccgaagctcaatacggccaacccggaagttcaggcttatttgcttgatattgcgctgtactggatccgcgaatttgatatcgacggctggcgtttggatgtggcaaatgaagttgatcatgcgttttggaagaaattccggcaagccgtcacggcagaaaagcccgacatttttatattgggcgaaatctggcatcaggctgatccgtggcttagaggagacgaatttcattcggtcatgaactacccgttcacagaaccgatgattgactattttgcagacggatcgatttcagcttcgcaaatggccagccgcatcaattcgcatttaatgagcgggatgaagcaggtcaatgaggtgatgtttaatttgctggacagtcatgacacgaagcggattttgacaagatgcggaggagatgacaaaaaggtgcgctctcttttggcattcatgtttgctcagacaggctcgccgtgcatttattacggaacggaagtcgggcttgacggcggcgatgatccattgtgccggaagtgcatggtttgggaagaggaaaaacagaatcaagagatgctcgcatttatgaaacggctgatcgctttgcgaaaacaagagaatgatgtattgacttatggcgcgcttgagtggaagctggttgatgaccaaaacgattttgtcagtttttctcgaacgcatgaaggaaaagagctgatctacttcttccaccagggcagcgaggtgcgccgtgtcagattgcgggatttgaagattgcaagcgataaaagaatatacgatgcgtggacggaagaagcgcttcagcatgatgatgtggtcgacattcagccaggcggatttttcattttgggggcggtctaaattctgttaccggtaacaggtttaaaactattgtaaccgctttctgtcgaggattacaattgtctcagattccaagatagaagggggaaaaaagatgcaacatttaaaaaaaggaattttagtgctgctggcgtcagttctgctgttcggtcttgccgcctgttcaagttcaaaggaaacgggaggcagcggcgggaaaaaagtgctgaccgtgtctgtagaagaggtctataaaccttacgtcgaaagcataaaggaaggttttgaaaaagagaatgatgtgacagtcaaaatcgttgaaaagccgatgttcgaccagcttgaagcgcttccgcttgacggtccggcaggcaatgcgcccgatgtcatgcttgcggcatacgaccgtatcggcggcttaggacagcaaggtcatttgctggaagtcaaaccgtctgacacaaaaagcttcggagacaaagaaatgcagcaggtgacggttggcggaaaagtctatggaatcccgcttgttattgaaactctcgtactctattacaacaaagacctgttaaaaacgccgccaaaaacttttaacgagctcgaggatttaacaaaagacaagaggttcgctttttcttcggaaaaaggaaaatcgaccgcctttcttgcaaaatggacggacttttacatgtcatacggtttaatggccggatacggcggatatgtattcggagctgacggcacggattccggagacatcggtctgaacaacaagggagccgtagaggcggtggaatacgccgaaaaatggtttagtgaatattggccgaaaggcatgcaggacaatacgagcgcagacgattttatccagcagacctttatggacggaaaagcagcggctgttatcggaggtccttggtcggcttccaattataaagaagctggtttgaactacggcgcagcgaaaatcccgacattgccgaacggaaaagagtatgccccgtttgcaggcggaaaaggctgggtcgcctcaaaatatacgaaagagccggagcttgctgagaaatggcttcaatatgccgcaaatgacgaaaacgcttaccgcttttatgaagatacgaacgaagttccggccaacctcgctgctcgaaagaaagcaggggagcaaaaaagcgagctgacgtcggcggtcatcacacaatacgaaacggcgactccaactccgaatattccggaaatggccgaagtgtggacaggtgcagaaagcttgatatttgacgcggcagcagggaaaaaatcggctcagcaatcagcggatgatgccgtgcgcgtgatcaaagaaaacattaaagaaaagtatgtgaaataaaacggcggttttagcgtccggaagaatagagggcgaaaaaaatgaacaaagaccaaacactagcaaaccggagccggaaggcagcgctgttatcgataattcccggtgctggccagattgcaaaccggcagttttcaaaggggatcctttttctagtcatcacaggcttgtttatttgtgagttagcgattttcggttatcaggcgctgatcggtctcgtgacgctggggactgtccccggagaagaccactcgctgtttctcttgatagagggcacgctgcaattgattttgacgctcgttttcttgatgttttacatctttaatctgtatgatgcccggaagaccgccgcgatgaaggcggcgggtttgaaaatcatcgagacggctggggacatgatcagaaatgcaggtgacaaagggtttccgtatttatttacgctgccggcatatctcatgatggtgtttgtgattatttttccggtgctggtgactctgtttatcgcgtttacaaactacgatttttatcatattccgccaaacagtctcatcgactgggtcggctttaaaaatttcatgaatatctttttccttggctcgtatcggcaaacattcgccgatgtgctgggctggacgatcatctggacgatctgtgcgacgacgctgcaaattgttctcggcatcgtgacggcgctgatcgtcaatcagaactttattaaaggcaagcggatgttccggatcatcttcctgcttccgtgggccgttccggcatttattacgattatgagcttcgccaacattttcaacgactcggcgggcgcgatgaacgtccaggtgatcccgcttttgaaccagcttccgttcgtcgacatcccggctgtcgcatggaagaccgatccgttctggacgaagacggctttgattatgatccagacgtggctcggttttccctacatttatgtcatggtgacgggggtgcttcaggcgattcccggagagctttatgaagcggcaaagattgacggcgcgacatttattcagcgctttaaacacattacgctgccgatgattttatttgcgaccgcaccggtgatgattacccagtatacatttaatttcaataacttctcgatcatctatttatttaatgaaggcggtccggggagtgcgggggccggagccgggtcaaacgacatcttaatatcctggatctataagctgacgacggggacgtcgccgcagtattccgtggcggctgctgtcacactgctcatttctttcattgtcatcggggtttccctgattgcttttaagaaatcgaatgcctttggcaatgaggaggtcatgtagatgagagggctttttaaaaatacgcggttcaccgggatgctgaacaaggttttgacctatatatttttggcgtttttaagcatcgtgattatttatccgcttttgatcacagcatcatccgcattccgggtcgggaatgtagcggcttttacactcgatttttcgggcgcatggacattggaccactttaagcggctgtttgaagagacgctttacctcaattggtacgggaatacacttgtgatcgctctgtctgtcatggtgttccaggtgacgattgtgacgcttgccggctatacgtacagccgctaccggtttgcgggccgaaaaaagagcctcattttctttttgatcattcaaatggtgccgacgatggcggcgctgaccgctttttacgtcctggccatgctgatcggagctttggaccaatattggtttttaactgcaatctatatcggcggcggaattccgatgaacacatggctgatgaagggctactttgatacagtgccgagagaaatcgatgaagcggcgcgaattgatggagcggggcacctgcggatctttgcttcggtcgttctcccgcttgtgaaaccgatgcttgcagtccaggcgctgtgggcgtttatggggccgttcggcgactatctgctggcgaaatttctgcttcggtcgccggaaagcctgaccatcgccgtcggtttgcagacattcatctccaatccgcagcagcaaaaagtcgcgctgtttgcagctggggcgattcttgcagctctgccgatttgcatcttgttcttctttctccaaaagaactttgtgtccggtttgacatccggcggaacgaagggataaatcgatgaacgacatgcgaaacgaaaagctgatcgtccgatttcttaaagcagcggcatcaccggcgggcgtcatgcgctgcaaacatgcattcagctggctcgaaatttcttttctgtttatgtttttgactgcttgtttaatggcgcctatgacccttgcgtttatgaaaatggaccgcttcaatgccgggtatctgatcccgaacgtcgctcaagaggctgacgcggcattcatcaaacaattaaaaggctaccaattgacaaacggaagattgaagggcgaagacgagctgtaccgtgtggagaaagggagaaccctgctggccgtcgatttgaaggatgaattaaaaacaagcggtgagaacgggcggataaaagcggaaggctatcaaaatgcgctcatctttcagtcagatcatctgatcatcagtgatcaaagcggagcggggttttccgttcgctatccggcaaaggctgggctgaatgatctggatgccggtcatttgggggattttatcggtgcaatgtggtttgcccaatataagccgcttatcatcatgctggcctgttcggcggttttcatcatctcgctttttttaacggccgttctggcgggaggcatctggatctccaaaaaatccaacatgaccgggataaggtcgtttaaggaagcggccgcagcggcggtgtgcggatcggcgcttccggcaggagccgcaatggctttcggtatgatcagctttgacttcatcgcgatgctgctcatccattcgtgcggtagtgctttgatggtctctttcattttcaggcacatcttcaagaaccgccatcacaacgaaaatctacagtcaggaggaaatcatggcaaatcagcggctatttgagatcgaccagtggaaaatcaaaacaaacaaatttgaaaaggaacataaacggcttcaggaaagtctgacatccttggcgaacggatatatgggaatcagggggaattttgaagaaagctattcaggcgaaagtctcaaaggcacatatatcgcaggggtttggttccctgacaaaacgcgtgtcggctggtggaaaaacggctatcccgaatatttcgggaaagtgatcaatgcgatgaatttcatcggaattgatgtatatgtagacgacgaaaaagtcgacctcagccaaaacgacatcgaatcgtttgaattggagcttaatatgaaagaaggcatcttgcggagaagcgctgtcgtccgtgtgaatcaaaaggctgtcaaaatttcgtccgagcgctttcttagcctcgatgtcccgcaactgtgcgcgatccattatgaagcggaatgcctgagcgatgaagcggtcatcacgcttgttccttatcttgatggaaatgtcgcaaatgaggatgccaatttcgaagagcggttttggcaggaagaagcgaaaggcgccgaatctcatcgcggccatcttgtgacgaaaacgattgagaatccgtttggaaccccgcgttttacggtggctgcttctatgtgcaatgtgacggaaggatatgtcagcgagcattttcaaacggatgcaatgtacgcggaaaaccgctactgttacgaagtgggaccgggaacaaaggcttctttaaagaaattgatcattgtcacaacgtcccgggattttgaagaagcagagcttttagtacagggcagggcgcttttggcggatgttcttcggcagggatatgaagaagcgaagcggaggcataccgaacattggatggaaaggtgggcaaaagcggacattgaaattaaaggggatgatgagcttcagcagggcatccggtacaacctctttcagctcttctcgacatactacggagccgattcacgcttaaacatcgggccgaaaggatttaccggcgagaaatacggaggagccgcctattgggatactgaggcgtacgccgttccgatgtatttggcgacggcagagccggaggtgacgaagaatctgcttttgtaccgctatcatcatttggaggcagcaaaacggaatgccgccaaactggggctgaaaggagccctttatccgatggtcaccttcacaggcgatgaatgccacaatgaatgggagatcaccttcgaagaaattcaccgcaacggcgcgatctgttatgcgatctacaattatgtcaattatacaggcgaccgggactacatgaaagaatacgggatagacgttctcgtcgaaatcagcagattttgggcggaccgcgtccacttctcaaaacgaaacaataaatacatgatccacggcgtcacagggccgaatgaatatgaaaacaatgtcaacaacaactggtatacgaacttgattgcgtcatggacgcttgagtacacgctcgaaaacctcgctatcctcccggaggaaaaacgccgccggcttgatgtacgggaagccgaaatcgagaaatggaaggatatcatcgagcgaatgtactatccatacagtgaggaattaaatgtttttattcagcatgatactttcctggataaagagcttcaggcagcggatgagcttgaaccgggtgaccgtccgctctatcagaactggtcatgggataaaattctccgctccagttttattaagcaggctgatgttctgcaaggcatttatttctttaatcaccgatttacaatggaagaaaaacgtcgcaactttgaattttatgaaccgatgacagttcatgaatcgagcctttcgccatctgtccatgcggtgctggcggctgagctcaaaatggaaaagaaagcgctcgaactgtataagcgtacagcgaggcttgatctggataattacaatcatgacaccgaggaagggcttcatatcacttcgatgaccggaagctggctcgccatcgtgcaaggatttgccggcatgcgcactcaggatgagaagctgtcttttgctccgtttctgccgaaggaatgggacggttattcgttcaacatcaattatcgagaccggctaatcaatgtgcaggtagaggaaaacagcgtcgttttcagtcttttaaaaggagaaccgctttctatgacagtttatggagaacagatcgcactgaacggacggtatgaaaggaggatggcccgatgagccaatggtggaaagaggcagtcgtgtatcaaatttacccgcggagtttttatgattccaacggagacggcttcggtgatttgcagggggtgattcaaaagctcgattacatcaaaagccttggagccgatgtcatatggctgtgtcctgtgtttgattccccgcaggatgacaacggctacgacatcagcgactatagaagcatatacgaaaagttcgggacgaacgatgatatgtttcaattgattgatgaagtgcataaacgcggaatgaaaatcattatggatcttgtcgtgaatcacacgtctgatgaacatgcctggtttgccgaaagccgcaagtcaaaggacaatccttaccgtgattattatttttggaaggatccaaaggcggacggttcagagccgaacaattggggatcgatcttttcagggccggcatggacgctcgatgagcggacaggacagtattatcttcactacttttcgaaaaagcagcctgacttaaactgggagaatgaagcggttcgccgcgaagtatacgatttgatgacattttggatggacagaggcgtggacggctggcggatggacgtgatcggttccatctccaaattcgtcgactttcccgattatgaaacagatgacagccgtccatatgtcgtcggccgctatcattcgaacggcccccgtctgcacgaatttatacaagagatgaaccgggaagtgctgtcccgttacgactgtatgacggtcggcgaagcaaacggctcagatgttgaagaagcgaaaaaatacacggatccaagcagacatgagctgaacatgatttttacatttgaacatatggatattgataccaaacagcattctccgaatgggaaatggcagatgaagccgtttgacccgatcgctttaaaaaagacgatgacgaggtggcagaccgctttaatgaatgtcggctggaatacgctttatttcgaaaatcatgatcagccgagggtcatatcccgctggggcaatgaccgcgagctccgcaaacaatgcgccaaagcatttgcaacagttctgcacggcatgaagggaaccccgttcatttatcaaggtgaagaaatcggcatgacaaacagcgagatgccgctcgaaatgtatgatgatctcgaaatcaaaaacgcataccgcgaacttgtcattgaaaacaaaacgatgacagaggaagactttcgaaaagccgtggcgaaaaaagggcgggatcatgcgagaacgccgatgcaatgggatgacgggaaatacgcgggctttacggatggagagccttggctggcggtaaatccccgctatcaagaaatcaatgtgaaagagtcgcttgccgatgaagattcgattttctattattatcagaagctcatcgggctgcgcaaacaaaataaagtcatcgtgtacggagactatcggctgctgctcgaggaagatccgcgaatctttgcgtatatccgcgaatatcggggcgaaaagctgttagtcgccgtgaatttatcagaagaaaaggcgctgtttcatgcttcgccggaattgcttgaggacagatgggatgtgctgttgtcaaactacgcccgagagcggcttaatataagcggcagtatcgacatggagccttatgaagctttcatgatgatcagccgggcaaaggattacacatcatgaaagcggtcatttttgacttggacggcgtgatcacggatacggccgagtatcattatctcgcatggaaacatactgcagaacaaatcggcattgagattgaccggagctttaatgaacggctgaaaggcatcaacagagagcagtcgcttgataagattttgattcacggcggcgcggccggaaagtttcaggaggcggagaaacaagagatcatgcgccggaaaaatcaatactaccaacagctgatccaaaacttgactccgcacgacctgctgccgggaatctccgtgctttttgccgaattgaaaagagaacatataagcattgcgttagcttcgtcaagccgaaacgcgcctgctattttgcagcggctcggtgtcatggacgaatttcagggtgtcgttgatccggccgcacttgctcacggaaagcccgaccccgaaatctttttgacggccgctgcactgctcggtgtgcctccgtctgaatgtgcagcaatcgaagatgctgaagccgggatcgccgcgatcaaatccgcagggatgttcgcggtgggagtcggtgatgagacatcgctgcgcggagccgatttgatcgtgcacaacacaaacgagctgacgtttgagctgctgaatgaaggatggcagcgctattgctgtataagagaaggaaaatgaaaagcaacccgagaatcataaaatgacaggccgccgctggcggccttatctgcaatcggagagggaagcaaaaccaagaacaagatcaagatcaaggcgttcggctggccggagagggagaccgttcagatatgcgttttgctggttatacaaccgatctcagcaacccgacttcgaatctatcaggcggttggatacagtcctgttgcagagtctatcgcctgcgtttttcaagaaaaacagcctaatcgatccctttaaaaggatgattaggctgtttgtttattggtgcatttgcaatttgacaaattttcgtttgccgacttggatgatcatgccgtgttcgagtgcaatgtccgcatgaatcgattccgctttggcgccgttgattttaacgccgccgttttggatcatgcggcgggcttcacttttggaaggaaggagttcgagcgtcaccaataaatcggtgaccggcaccgttccgccaccttgccagtgtacggctgttatattgtccggcgcgctgttttgctgaaaaactttcttaaactgctgttcggccgcttctgccgccttgcttccatgatacatgttgacaatggttttcccgagaagcatcttcgcgtctctcggatgaacggcccccgtttccaaatccttgacaagacgtttttttcttccgcctccaagtcggtcgcaagatggatatactttttcatcaaactgtccggcagagacatcgttttcccgaacatttcatgagggtcttcatcgatgccgatgtaattgttctttgatttagacattttttcaatgccgtcaagcccttcaagcagcggcatgagaatgacgacctgtttttcttttccgtacttttcctgaaagtgtctgcccatgagcacgttaaaatgctgatccgttccgcccagttcgatgtcgctgtccagaacgactgaatcatacccctgcatcaacgggtaaaagaactcatgaagcgaaatcggcttttgcatggcgattctttcttcaaaatcatcgcgttccattaaacgggcgacggtaattttgcccgcgagctcaatgacgtcttccaaggttaatcgtttaagccattttgagttgtagtgaagctcgaccttgttctgatcaagcacttttccaaactgttgaaagtatgtttcggcattgcggcggacctcttcgtccgtcagctgtttcctggcggcggattttcctgttggatcaccgattttccccgtgaaatcgccgatcaggagctggacgatatgtccgttttcctgaaactgacgaagcttattcaagacgacggtgtggcccaaatgtacgtcaggcgcagacggatcgaggccgagtttaattttcagcggttcgccggtcaaaatcgatttggccagctttgcccgcagttcttccgggggaatgacctcctccgctccgtccatatataagtgaagctgcctttcgacttcccgcttttcggcagttgtcagttgatcaaattgttgttgctgcatgataactcctcctttttttgtataaaaaaagaacctcatcccgataagggacgtggctcaaatgcacgcggtaccaccctgattgaagaccttcatcttccgctcaatttccggtaacggcttcccgttctttgctacttgaaggttcacaaagaaagctcagggaggtaattcacgtctgcctttgtaccggctcgcaccagccgccggctctctggaacagggagacagtccgctactcgttcccgtcgttgcttatggtttatgaagattgtcattcacttttcgaaggagctcgatcaatgtattctgctcctcttttgtcatgcccttgatcagcattgtttcccctttgtggaacgccggataaagctcttcaatcgcggcttttccttccggtgtgatctcggcgtaaacgtgtctgcggtctctcggatccgcgcttttgacgcaaaagttctttttctcaagcgttttaatgacattgctcgcagtggctgttgaaattcctgacagttcggcgagttttctcgtttcaagcctgccccatacccatagatcgtaaagaatcgaaaaagccgtccaagacaattgatatgaggaaaggacctcggtctccattttgacgcggagcttttgcgccgaccggtaaaggttggtggcgaccgaaatggcttcaagattcaaggattcgatcggcatgcgcttcagcttgctgagggtgtcgtgttcttcctgtcgaagatggggggatctattcaatcgtgacgcctgccttttattttcagaattattagctatgaaatgaattttaacagacggtctccatcaatgcaagcccttgtttgacatgatgagaaaagccggcatcatgatgatgaccggcgcttgtttcagctattttttggtgatctgtttgcggcgcacttcaattcggtcccctttttgaatgctgtcatattgttttttcgagacgaggacggcatgtttctttccgttttgatcttcaatcaacagccaatatcttttttcttttcgttcagagagcgctttttctttgattcctgcggtacggaggatgtttttttgttccgctgtatatccgcctacgtggaagatcatccaatatggaaagtagtaattcaaaaaggctgatccagcaggattttgattgagtgtccgcttgatgcttcctttgtacagggcatcgggaggcagtgtccgctgaatggtgttgaactgactgttcttgtttaagtatcgtcggctcgcagactgtttcatataactgcgcatactctggttgactgaacccgcacgtgtttttagagcgctgttattagccgaggaactcgaagccttcaccccggatgctcctttgctgcctgctgcctctgcttgagcaaaaggcagcaagagggacagcgccatgatcaaaataagaggagcgctttttttcttcattgttcatcactgcttttttgttcaactttgtctttgacgacgccctcaagcggctcctgatcatatttaatgtatgggggacgaaagatgaaggcttcctgatcgcggattttaatataaggctgttcgacattttctacattttccacatattttttgaaagtctccgtcttttcttttccatctttcacgtatgctgctttcagtaatggtgctttgtcggattcgctgtcattcacgtaatcaaaccatacgagatcgtatttttgaatggattggtcatctgcgacctcctgtgaacggtctgaagcggatgatgaacatcctgataagggaacggctaaaagcatcgcagccgcggataaagagatcagtttcgattttttcactgtgatcatcctattcatttcggtttcgcttttatatacgaacgatccgggcaaaggtgtcatctattcaaaatagattggcagaaaacagggcgtaacaattgcattttaaacgtaaacaaactgtaaaataccatttctatgaaaaaaggtataatttgaatgtcagaaaaaaatcccattcacggaggatatttttatatgaagaagatacttttttctgtttttgttttggcaggcagcttgctattggcttttaattttgccggtgaagcgagtgctaaaacgaaaaaagtcagcggctatatcacttggtacaacggagtgggcaaaatcggcgctgacggcaagaggctcggccattgggactgcgccacaaagatgggcttcgattgtccgagaaaaggcacaaaaataagagcctattcaaaagcaaaaccgcacaaagtcattacagtctataaatatgatgtcggcagaatgccgggcgctgttttggatgtaagcccgaaagcttttagagctttgggatttccgacaagcaaaggaaaggtagccggacattatacatataaaaaataggagaaatgaagcaagaaaaatcgttttcttgcttctttcaattggcggggtcgaatatgaaaaaagtttcagttgttttgttggcggcagtcattttagccgcaggcgcatttgcggccgtccgctatttcgtcccggaaaaagcggagccggcaaagagcggcggttcagacctgcttgtatcgataaccgatcagaagctgatgaccgcttactatgaaaatcaaaataagctgtatgaagaaaagatgacggattatccggctatggcattagaccggaaaaaacgaattctttactatacaaacaccgataacagcaatgtgaagcatttgatcaggctggatttacagtcgggcaaaaaaacaaccctatattcaggagatgaatatgtcgacgggctcagtttatcggcggacggttcgaagctgttcatgagatacaaccttgcggaggagaggaattttcaccttgcttcctttgatttaaaacaaaaggcgtttcatgtcatctatccatcgttgaaaaacaaggacgaaactgtcagctactatcagtacaacaaagctgacaatcaattcgttatgctgcattattcattgaaggaagactatcaaaaaacagatgatgcgaacaacaaaggcgtgccgcccgaaccgacgaatatgaacatttccatggcgggtgtgaaagatcggcaaaaggtgagaacgatagcaaaatttatcaatgacgtggcaatttcgccggatggaaaaacgattgtctttacagaatcggctgatgatcagaaggcgatttatgcgatggatgccgaaacgaaaaaatacaaagcgatcatttcagatcagcaggcattttcattggtcgattcagcacagccgcaattctcgaaagacgggaaaaagctttactttctcgctgaagcaaaagatgcgaagctgcttgaagatgaaacggggagcgaagcaagggtgagaacgatctattcgtatgatatggatacgaaaaaagtgagcaaagcctgggaaaaaacaaacgggatcatcaacacctttacggtcattgacgaataaacgggcaccagccggcacaaacagactgcgccggctgtttttttatgagccgtttgcctgagacgctgcagcagagcttgtcataatggcgattgctgccgtctgctgtgcttgaataacagcttcaagcgtttgataaagccctgtatccaaaagcgccgggtcttccgttttttcgctcatgtacaagttgacggccgttttcagattcatgtctttctgccacctgaacagtttatcgctgttcaatgcgcctgccatgatagtgatggcatctatgtctttttcgccgttctcaagcagcgcgagcagtccgatttccgggtaatggacaggctttggtcttttatgcttttttgtcaattcatcgtatatccggagggagcgggcgacaagctgatctgaatcctgctccggcataagcgagaggatgtggctgagaaactgcaaatcgttccctttgcgaaaacccgcctggttaagcttttggtaaaacgcttcgatatagtcaatcagttcacctgtctccatatctgaaccggccaaaagcacggagagcgggtagtcgccggcagatgttaaaaaaacgtgcttgtccttcattcctttgtaaatagacaaagcccgattgattttgctgtcatgatcatgctcatcacggtattttgtcaaaagaataagagcggacaaataagtgaaaatactttttttgaatccgttgccggtcattttttcataaagagtgaaaaaaggtctgatatgcgtttcaggttcttcgaagcgtacgtcaaacatagcggcaaaagtgtagcgatgggctgacctcaacggcgaaaatgtaccggcggcctgtttgacagcctcactcagctttaaaaaccgttctttatcaaaaggccgcttgttgacgacatacatggaagcaatcatcattaatgtccgctgatctgtgactttccattttaaatcgctttttaactcagagtaaattgctttatattgatccaatcgctgctgcagtttagcagatgccatttatctatctccttcctaggtttgcgtgtttttgtatatacgaaacaaagggaaataagtttcagggatttggcatcatatcgggcttctgcttaataatatggaaaaggatacagcgcagcaataaaaacaaacgggaagatccttctcctgaaccgcctgaatcgtcggcgcggatatccgtaaccgccgtaaaactgcctttcatctgtcacgtcttcgggaatgaggacagatgcttcctgacggttcaccccttcaagaatgccgtgaacagaactgccgtccttcattttcagcacgacgtgatagtgcatgtatttgcggcataaatcgtgcaaagacctttgatgatcatggggcatcgagcaagcggcatctttcggaacactcatattcctttccatctccttttagatacatggtattcacccgatggatgaatgttccggtttgaagcggtgaagccgtgattttatgtaaaaaagccgattatcatatatgaatcggctttaaagatcaacggtcagcacttcattctgcggcatttgaagcggtcgtcatcgtcatcagaaaagcactttctttttctgcatttgaaccggtcatcgtcagagctgcgggttttatccgttttatccgctttagctgttttatctgttttattcgttttatctgttttattactatccgccgaacgccgcgctttcattgactgtctttctttttcccgctcagggctgtatggatcgtaattgtcatagtactcttcgtagctgctcattttgaggcaatcaccgcctttgggtcatgatatgataatgtattataaagaggggcgttttgcctgtgcatatataacggtttttcgtgctgtaaataagctgatcaactgacaaaattcaacattgaataaaggatttttcgtttcaaccgctaatattatatgtatcaaccatttttttacggctgcgcctgccggtgcttgcggaaagcattcagacggacggcctgatatgatagaaggagcggaatgccgatgaaacgatccggaagtgaaggagagtacttatgaaaaatagtagaaaaaaagagatcttatcgtgggtgaaaacacttgtcatcgccgcagcgcttgtgatggtttgccgctattttctgtttacgccgtcaaccgttttgggagattcaatgtatccgactttagaggacggcaacatggtcatggttagtaagatcagcgatattcagcgctttgataaaattatttttcacgcgcctgattcggatgaaaactatgtgaaaagggtgatcgggctcccgggagatacgatcgaaatgaaggatgatgtcctttatataaacggaaaagcatacgatgaaccttatttaaagaaaaacaagcaaaagctgacgcttcatgaacatttaaccgataatttcacattggagaaattaacaggtgaacaaaaggtgccggaagatcacttgttcgtgatgggggataaccgtcaaaacagcaaagacagccgctttttcggatttatcacaatggactccgttgtcggcaaagttgagttccgttatttccctttcaatgagatcggcggaatagaatagaaaacaaaaaggcttcccatgatacctaatgggaagtctttttgtttgtcgcaaagtcaccaaaagtggtttaaaccaagccgctatgcttgagcacggcggcaattctactattcacttaaatttaaattagagccagtttttgatatcgcagttgcagaattaggtctctctgaattataaggattgcctttaatttggtataaaagcctgtttaatcgctgattacccaaacaaaaataactaaaaaatcctcgatttaacaatttagtgtatggtactctttaaacatgtaatcaaaaaactatctttttcgctccaaagcaacataccgtatttcttggtttgttttttagttgttctaaatattttttattgttatcgcaattcttacgttgtttgctgcaatgattgaagtactatattacataaattctgataggaggtcattatgtttaatagacaacagatagatcatctgcttgaagaaaaaaaaggagagctgaagaaaaagttcggaagtggttttatcgcagttttctatatttctattcttctttccatatgtacgttttttatagaatacaaatattttctcattgtattattcgcacccactattattgtcatgttaatcaaccctcctttttccgaaaaaaaaggggtgtttcgtttcattgccggcctttatttgcttttattggcactggcaacatacttttggcttcgagcataaacagtccggatataaaaaacaaaagtggcttcagcccgcggagaaaaggcgaatttacgtttaacattgctgccaaaatctcaaaaatccggcgacttgacttgaaagagtcctcatcgccagaaaacagaatgaattgcacaaaaataggacagaatataaaagtccgacctattttgtcaacgatctgaaaggctgcctgcagttaggatgggaagcctttttagcatttgcgcattttggcgagcggacggtttgaacaattatctggacagtgaaataatgaaataagaaactggcaacaaggaggataagcagatgaaagtgtttgtagtgggggcgaacggacaaatcgggcgccgtttgacgaaaagtttgaatgagagcagcgaacatcaggtcagggcaatggtgagaaatgaagagcaggcgcaagctttgaaacaatcgggaacagaaacagcgctcgctaatttagaaggcaccgttgaaagcatcgcagaagcggcggagggctgcgacgcgattgtctttaccgccggctcaggcggcaatacgggcgctgacaaaacgcttttggtcgacttggatggggcggttaaaacgatcgaagccgccgaaaaagcaggcattcgccgctttattatggtcagcacattgcaggcacaccgccgtgaaaattggaatgaagcgttaaagccgtattatgtcgccaaacattatgcggatcggatgcttgaaggcagcgaattaaactacacgattatccgtccgggaggcctgttaaacgaaccgggcacaggccgggtgaaagccgcggaaaatcttgagcgcggaacgattccgcgtgaagatgtggccgataccatcttggcggcgctcaccgaggagcacacattccgtcgttcgttcgatttggtttcgggtgatcaaacgcccgccgaggcgctgaaatctatataaaaggattcggggaacctgtggtcagaaggttccccggcgtttttacagaagcgggatatagatggtcatcttcatctcgttcggcggtacggaacggcacacatcagtcacttcaaagtccggtccttctgttctctcgtaattggtattcatcagccatgatccatagatgtatcttcttgtgttctgcactgattcagtcgatccgtttacatgaaatacggcgtatttgccgccgggaattttcgtataaataagcggctccggcacttccccggctgctgtttcgcgaacggcttccccgataataaatgagaaacctccgtcatcctggaagcggcatgacagcccgtaacacatattcggatccgttttttgaggaatttgcataaagtatccatttctgccgaaatcgttgtagaatttcgggatatcttcgaaatacttttcatcgtttaaatttgtccggtactcatatccgatcatatgtatgtcgtttaaatgagtgatgtgcggctttgggatgttcatatctccagtcatcctttctttatattcgaggaaattaattttagattgaaaatcaagcttgaccttcgctttgcgatacttggccggagtgatgccgaagtactgtgagaaagccctgctgaaagcttcttgtgagccatagccgaaattgattgcaatgtcgagaatggaacggtctgttttctcaagcagaagcgcagcttcagacagacgccggttgcgaatgtattgataaacggaaaaaccggagatcgcctgaaaaagcctttgaaaatgaaatggggagaaacacgatttagccgcaatatccgtgatgtttaaatcgttttgaaggtgttcttcgataaactgaaccgcgttttgaattctttcgtaatcattcatattcatccacagcctttacgatttgatgatcctattgtacaggatcaagcgatggtttttttgatgatttgtgcttttttaaaagcctccaaatgcggaggctttttcttattgatgacgaacatctgtcacttcaagagggcgcatcatatcgtaatcttcgtgctcaaggatgtggcagtgccaaacatatctgccgctgtacggcgcaaaggtggcgataatgcgcgtcactgaacccgggggtactttgacggtgtctttcagccccttttcattcggtgccggaggaactgccggaccggtaaaaacaagttctccgttttcctgataccgctcgatatcaaacggccggtggtcgagaatcataaattgaacaagatgtaaatggatcggatggatcgcccttccggcattgatgatcgaccagatctcagtgctgccgagtgcgggtgtttcggttaccggttcatgccactttgtgttgtttaaaagcagaacaggtcttccatattggtcaacggccgcgcccaatgacagatttctgagggcattgatcttgtgtctccggtaaaatgggcgctttctcaatattctcggcaatgaacttgtatctttttgcttcaaaggttttgagatgcggaattgcatgatgtcggcatcagtatcgggatctgcgtcttgtccgccgcagccgatccggtttttcagtgtcacggtttttccttctgctcgtgaaaaatcaacgatgatatcgcacctttcagccggcgcgatcaccagttcattgactttgaccggatgctgcagaagaccgccgtccgtgccgatttgatgacatgtgatgtcatgatcgaaatacagctcaaagattctcgtattggaggcgttcagtatccgaaaacggtattttcggggttccagttcagcgaaaggccataccttgccgttgactaaaatggtatcaccgcaaaaagccggaacaatcgacgggtccggaagatccggcgaagggttgtcaggctgccgcggataaaacaatgaaccatcttcatgaaatgatttatcctgaatcaaaagcgggatttcatattctcccttcggcaagttcaatgaacgctcttccctgtcgcgaataaaatataaaccgacaagccccgcatatacattcagccttgtgatggccattgcatggtcatgataccaaagagctgtagcatcctgctcattcggatattcatacacctccctttcaaagaaagggccttttgcatggaagtcttttgtgtaccaagcctcaggatatccgtcgctgtcagcaggcgtacagcctccgtgcaaatgaacgaccgtcttcacttcatgttcgtgatggccgtcatcgtgaagcgtatggtcgacggggagaaaatggcgatccggaagcttatttaaccacttgactgcgactttttcgtgtttctgcacttcgaaggtagggccgggataaactccgttatatccaaacagccgagtcggcggcagatcgcggtgaagctgctgctgaaattctttcatggtgacttcataataggtcatttccttgcttttgctttggggttgaagcacttgcggaatggggagccggtcaacgaatttttcaagtttcatgtttcacctgtcctcttttgttctgatgaaaagatcattacattataagacgggttgcatggtctggttcctcatgatgagaataagaaacgcagtatgtgctgagtatgttaaaaaatagaatcgatcattacaagaagatgaacaaaatatttcctgacgattaaaaatcgccttgaggcgtgattcgcggaggaagaaaggcggggatgatggtacattatgtgtaaaccctttcttatggggcgaagcggtctgaaaggagatacccgtgttgcagaaaagaatagagtggattgatgtttcgaaaggcgtgggaattatattggtcgtattgggccatacaccgacgccggattggctgaaaacgttcattttcgcatttcatatgccgctgtttttctttctgtccggcctcgtttaccatgatgggaatatgacttttacatcttttctcttaaaaaaaataaagacgctccttttgccgtacttcatcttctccgttcttgcctatttattctgggttctcgtcgagaggcattttacgttcaccggcagttcggatgtcgacccggttgtaccgtttaaagggattttttattcgatgcctgatgactacatgctgacacacaacccggcgctctggtttttaacatgcttattcatcgttgaaatactgtttttcatcgtgaagagatgggggaaaggcagactgtttatcgtcatagccgtattggtctcagccgctttaggctttttgaattatcaatatctcggcatcaagctgccgtggaatattgaagtggccctgaccgccatcgtcttttattcggccggttttctgttgaaaaataatctgaaagagatgagagaccgaagaatgctgctgctcacgcttcttttattcatcgcggtcggctgcttgcagaccctgaacgtcagagtggatatgagggccaatgagtacggaaacatggcgctcttttatatgacctcatttctggggacggcaggcgtcattttcagcagctttcaccttgaaaaagcaaggcttctccaattcctcggcaaaaactcgctgatcattctcgtactgcactatccggtcatcaggatgctgaaagccgtcgtctactacttcacacaggtttcccttgatgagacatacggctccctgttgtggagcgcgctttacaccggcatgacattgcttgtaatggtgccttgcatctttttgttgaaccggtatccgatcgtacttgggcggaagaaatgcaattaaaaaaacttgcaaagttttctttgcaagtttttttgaattatttaaggttgaaagtaatctttttgtcattccaaaattcaggagtgtagataactttatatgttttgctctttttagtctcgaaagtgattgttccagataccttgccgtttggtgtcagatttccagaagataggtcgttatcatctgatggtccaaacgtattgtgcgtaatttgtccatcttcattttgaatttgaaaatcgagcgggttataggaaatatctttatcgcttttattttctatgttaagtgttgcaactacatattcattaccgttttttggtttgaaatattcattgcccatcgattttttaacgttagtaactgtgatgtgtgtgccgtcaagatcagctgtttcatttaaaccgaattcagttttttctttggcatcgtcattgcttttttcttcgctagtttttgcggctgtcgtctttgcgctgcttccggacgatttgctctcttgagtagaagagccgcttgaagcgaacatcatgacgaatacgatggagctaataatcgtgacatagaaccaccatttttatagacaaggcctttattcccgccactgaacaatgctttacatccgccgattaaaagcaggataagcggaacgatatatgccaggctgacgccgacagttcctcctattgcagcagcgatataaaaaggttgctatctgcgctggccattgtcggtgcatgtatcgtaatgtccacctcataatctatttaataatgtctgaaacataataatccaaaaaaaggaaaaagtctattttattatgatattttaatcgtcagagctttaaggactattttcgacttttttaatatcgtttaaattttgagtttgtttaatgtttttcagaagaatcattcatggattctaaagaaaaaatattctgaaagaagaaaccgtcctttccatcctatgacgcttgaataatttgaggttttcgaaaaatccttatatagagcgggttttaacggttttgaccaaactgaaatttgtttccttaaataaaaaaagttctactctgactatatttctgcaagaagtgaatcatgtttctatagactcactcaagttttgctttgtatgattaaaagcgaaaactcggatgggaaaggaagctttttatggaacggtatgatgaattaaaaaaaggtgaaaccggggcatgggtcagcatcatcgcttaccttgtactgtcggctgttaaattggccgtcgggcttgcatttcactccgaagccctcagagccgacggactgaacaatacaaccgatattatcgcctcattagcggtgctgatcggcctcaggatttcgcagaagccgcctgatgaagaccatccgtacggacatttccgcgctgagacgatcgcctcgatgatcgcttcatttatcatgatggtggtcggtcttgaagtgctgtacagctcgggcgaaatgctgtttaatccgaaggaaacgacaccggacatgattgcggcctggacggctgcaggcagcgccgtcgtgatgtttttggttttcctctacaataaaaggctggcaaaaaaggtgaacagccatgccctctatgcagccgccgccgataataaatcagatgcctatgtcagcatcggaacattcgcaggcatctttgcttcgcaatttaaccttgcatgggtcgatacggcagccgcgtttatcattggattaatcatctgcaaaacggcttgggggatttttaaagaggcggcccattccttgacggacggattcgatattaaacatatttcaacctataaagaaacgatccggaaagttcccggcgtcggcaacatcaaagatgtaaaagcgcgttatttgggcagcgccatccacgtggaaattatcgtggaggtaaggtcagatctcaacattgcagaaagccatgacatcgccgatgaaatagagagaagaatgcaggaggagcactcgatcgttcattcccatgttcacatagagccttctaaagaaaaataaaaagcggtcactgaccgcttttttttactttcatcactctgtaaattcgaaatgaaaaaagacaaaattctattttccgccagtcagttgttttctgggagcacatcgtttatggtaaagttaaataaattcgattcgtcagcaatgaggaggaagaggatgtcatacgaagaaatgctgcatcccgttttgggaaaagtagctgataatattgacaaagtaatggtaggaaagaaagatattgccgttttaagcctgactgccattcttgcaaacggacacgttctgctggaagacgtacccggcgtcggaaagacgatgatggttcgcaccctggcaaaatcaacaggcgctgaatttaaaagaatccagtttacgcctgatttactgccttcagatgtaacaggggtttccatatataatccaaaaacgctggaatttgaataccgttcaggtccgattatgggggacatcatcctcgccgatgaaatcaacagaacatcgccgaaaacccagtcggcgcttctggaagcgatggaagaaggaagtgtgacagtagacggtgtgacaatgccgctctcaaagcctttttttgtgatggccacgcaaaaccctgtcgagtatgaggggacatacccgctgccggaagctcagcttgaccgctttttattcaagctgagaatgggatatccgacagtccgcgaagagcttcaagtgctcgatcttcaggaaaaccgcagccccattgaggaaattgagcctgtcatagagaaggaagagcttgccgcatttcaaaaagaagctgaaaaggtgtatgtagacgctgcgattaaagaatacattgttgggatcacccaaaaaacgaggagtcattccgccgtttatctcggggtgagtccgcgcggctcaatcgccttgatgaaggcggctcaggcgtttgcatttttatataaccgcgattatgtcattcctgatgatattcagtatttggcgccttttacccttgcgcacagaatgatcctgcggtcagaggcgaaatttgaaggaaagcggcctgaagctgtccttcaggacatcatgtcaaaaaccgaagttcccgtcggaaggccgatgagcagctgatgagagagcgcatcggtcttgtgatgtacggatggaagctgtttattctgtttcttctgtttgcttcaacgttttgctatgcgatgtttcaagggggatttgtcagctggtttctgttctactcatttctcccctttgcgctttatgctttcctgtttgctttttatccgctgaagaacttgacagcggagcggaggctgagccaagggcagtataaagccggtgatcaattggaggctttcgtcgtgctgaagagaaaatggccttttccgatcatgtttatgatcgtggaagactgcctgcctgattcgctggggaaaaacaggggttcggcagaggccaaacagcttctctttccttggtttaaaaaagaaattaaaatggcgtacacgatcgattcggttccgagaggagaccaccgtttagcaaaaatcagagtccgtacaggtgatccgctcggcctgctggaaagggaatgcgagattcaattggaagcttcctttctcgttttgccttcctatcaggagatcgcttaccgcgccagcggaggctcttatgacgagcatgcaggccgcgtttcagagcttcgccgcaaggacagtacactggcgtcaggtatcagagaatatcagccgggcgaccgttttgcatgggtcgactggaagacgtcagcccgccgcagccagctgatgacgaaggaatttgagcagacgaaaggggatgacctgctcgtctttatggatcagtccccgtctgaggcttttgaagagatcgtcacgtttaccgcttccatcattcgttcggcaatgcggagcgggacgaatgcagggcttgtttccattggtaaggagcggaatgtcttcccggttcggcagggggaagagcagctgagaaagctgttctactacttggcgattgccgactgcaatgcagtccagccgtttcacagtctgatagagggggaattgggacattccgatatgagaaaagccgtcaaatatattgtgacaagccgcatcacgatcgaactggtgcaggctttgaagaaaccgctctccggcgggcggcccgtcatttgtttggtgaagaaaaaaggcggagatctatcaagcgaggaaagcgcggctgtccagcatttaaaagcgcggggaatcgaagtaaacgtcatttacggggaacatttttcccggggtttggctgaagcgaggtgagaaaatgttgtccgggggaaaaagaaacaggttcggtttattgcttttttatgtgctgacttttttgctgctgtgggagtggctccgtcctttgcagtattttaccgatacggggcacaccgtcttttttattttatttatcgctcttgtatttttgcttacattttttaaggtcccttggtttatcagatttccggtcagccttggcttcgttctgtttgcactgcacacgattttttacgaaggatcggtgttttcaccttcatggattgccctgtttttccaggatttaaagcgaaatttctcctatattttctccggcatgtggcgggatatgtcgccgttgtttcggacgctgctcttttacgtccttctttggctgctcgtatacttgctgcactactgggtgatctatcagcgcagaattttattcttttttattatgaccgttgtttatgtcgcggtgatcgatacatttacgccgtttgacgcgtcatatgcgatcgtcaggatcgtgctgatcggctttttgcttctcggcctgctgtatttggaacggatcagggaatcagaagcgctcaaatcctcgaaatcgcggtttgccaaatggtttgcaccgctcttattgatgactgccgccgccgtgtgcatcggcgcggtctcgccaaaagccgatcccgtctggcctgatccggtgccgtttctgcagacggctgcgaccggcgattttgcttcctcaggcagaagcaaagtcggctatggaacgaatgatgaggcattgggcggtccattttcaaaagacgatacatgggtatttacatggcagggaaatgaacgaagctatttcagggtggaaacaaaaagccgctatacaggaaaaggctggattgaagacgaaaaatcaggcgcatccattcagcttgaagaggataaactggattaccagtggtacgacgaaagcgtgaagaccgaaacgcgcaaagcgatcgtcgatatcgatcccgcttaccggtacgatcatgtcctgtatccgatcgggacgaccgaaatcaagctcaataatttctttgtgccgctccgcatgaacttaaatacggagaaaataaaaccggccggcaagacaggcgcggacattcagaatctggaaagctattcggtcacctataaatcacccgtctttgatgtcgatcagctgaggaaagtcagcttggagtcggaggggaaatgggccaggagccatgagaagtacctgcagcttcccacttcccttcccgaccgcgtgaaaacattggcgcacgatttaacgaaagacgaagataatatatatgacaaagcgaaagcgattgagaagtatctcggttcttccgaattttcttatgagacggaagatgtcgctgttcctaaaggagaccaggattacgtcgatcagtttttatttgagacgaaaatcggctactgcgacaatttttccacggctatgatcgtactgctgcggtcggccggaataccggcccgctgggtgaaaggctacacatccggtgaatatgcaggaacgacggcagaccggaaacgcacgatgtacgaggtgacaaacaacaatgcccactcctgggttgaagtgtattttgaagggcaaggctgggttacgtttgaaccgacgaaaggctttttaaatcccgagcagctcgttgaagagtccagcggtcagcaagccggcgcggcttctgataaaaaagaagatgataagaaaaatgatgaaggccagcgtccgcaggatgcaaaagaacaagacaacaaagagaagcccgaatcccaggcaaagcgtgatgccaaagccgattcccatgccggaagcgatgatgcagaccgtactcttttgactggtgcggccgtactcggtctgttgctggcgtttgcagcggtgctttactatacaagggtgaaatggatgccgcacatcatcatcaacaggctgaaaaaacggcgtgatgaagcggttttctttaaagcctacgacgaactgctccgccagctgaagcgccaaggcatgcaaaaagaagaaggccagacgctgcgcgagtttgcgaagacggttgatgaacgctttcaaagcggggacatgacggctttgactcttcaatatgaacgggctttgtatcgaaaggaagacgccgcaaagctttggaatgattcggcggagttatgggaaaatttaattaaaaagagatagtcttgaccgctttcagtcgtattgttagaataagtgaatattaaaaacccttatatattcttgctggcaggctcggcggcttatctatcggacaagccgggccttgtcccgtgaatgggggcaggacggccgtgtgtctgccgccattttttctgtgcaaaaagacaatttgataaagaggtgacaccatgacgaagttagtaaatgaaatgattcttgtgttggattttggaagtcagtacaaccagctgattacccgccgcattcgtgagtttggtgtatatagtgaattgcatcctcatacgttgacggcagaggaaatcaaaaaaatgaatccgaaaggaattattttgtccggcggtccgaacagcgtttacgacgaaggatctttccgctgcgacgaaaagattttcgaactggacatccctgttcttggaatttgctacggcatgcagttgatgacgcattaccttggcggaaaagtagaagcggcaagccagcgcgaatacggaaaagcaaacattcatatcgagggtgaaccggatctgtttaaagatcttccaaacgaacaagtcgtctggatgagtcatggtgatctagttgttgaagttccagaaggctttaccgttgatgcgacaagccatcattgcccgaactcagcaatgagcaagaaggataagaaatggtacggcgttcaatttcatccggaagtccgccattcagaatacggaaacgaccttttgaagaacttcgttttcggtgtttgtgaatgcgtcggcgaatggtcaatggaaaactttattgagattgaaatgcagaaaatccgcgaaacagtcggcgacaagcaagtactgtgcgcgttgagcggcggggttgactcctctgtcgttgcggtcttgatccataaagcgatcggcgaccagctgacttgtattttcgtagaccacgggctccttcgaaaaggtgaagcggaaggcgtgatgaaaacgttcagtgaaggcttcaacatgaacgtgatcaaagtggatgcgaaagatcgcttcctgaacaagcttaaaggcgtctcagaccctgaacaaaaacgcaaaatcatcggtaatgagtttatctacgtgtttgacgatgaagcggaaaaactgaaaggaattgacttccttgcacagggaacgctatacactgacattatcgagagcggaacagcgacggctcagacgatcaagtcgcatcacaatgtcggcggccttcctgaagacatgcagtttgaactgatcgaaccgctgaatacgctcttcaaagacgaagtgcgcgcgctcggaaccgagcttggcatccctgacgaaattgtttggcgccagccgttcccaggtccgggcctcggcatccgcgttcttggagaagtgacggaggaaaagcttgaaatcgtccgcgaatcagacgcgatcctccgcgaagaaatcgccaaagctgatcttgaaaaagatatttggcaatacttcaccgttcttcctgatatccgcagcgtcggcgtcatgggagacgcaagaacttatgactatacgatcggcattcgcgccgtgacatcgattgacggcatgacatcagactgggcgagaattccttgggatgtccttgagaaaatctcgacacggatcgtcaatgaagtgaagcacattaaccgcgtggtttacgatattacgagcaagccgcctgcaacaatcgagtgggaataagaaaaatgcctcagccgcatgaagctggggcattttttattggtggagcagtagattggatgatataacgcttatatcttccgttttcatcgccgcagccgctgtgccatgaatcttccgatcacagagtgacaaccgaacaaggcattaaagtctacgatacagttcaaacggtgttcgaagcgcggtcttgtcggaggatatgacgcggaaacagaatatcacgctaaaaaaagagcgtgttttatttgaattgaaagaaaaccggggattgagccccttcagaccacgatcagaatttggaaaaacaacgaacgaagcgaacattaaaatcatgaatgttcgtttttttgtattgtgttcaacgttagatattgctacaatagtatagtaatttaaaaaagacttgtcgtataatcatggggatatggcccataagtttctaccaagctaccgtaaatagcttgactacgcttgtatacaatattttatccgtgaaaaatcattttttcagtatgaaatatgccgtagtcaagcgtcccgccagttggggcgttttttgtttaaaagcaaaggtttatgaaacaataaaagcgacagacaaacgagaggagtataccattttgaagcgttactttcagtttgaagaattgggcacaaattatcggagagaaatgatcggcggactcaccacatttttgtccatggcatatattttgatcgtcaacccgcttaccctttctctggcgtcggtggaaaatttcccggatgcattgagaatggatcaaagcgcggtctttacggcaactgcggttgcagcagccgtcggttgttttatcatggggctgctcgcgaagtatccgatcgctctggcgcccggaatggggcttaacgcattctttgcattctcagtcatcctgaatatgcagattccttggcagacggctctttcaggcgttatggtttccggacttatttttatcgttctttcgctatccggtttaagggaaaaaattatcaattcgattccttatgagctgaaaatggctgtcggtgcggggattggcctgtttatcgctttcgtcggtttgcagggctccaaaatcgtcgtatccaacccggatacgattgtgtcgtttgggaatattcattcaggtcccgttcttttgactgttttcggactgatcatcactgtcattttaatggtattgcgcgtcaacggcggcattttcttcgggatgctgatcacggcgattgtcggcatgattttcggacagattgacgttcctgacaaaatcgtcggtgccgttcctagtcttgcgccaacatttggacaagcctttatccaccttcatgatatctttacggtgcaaatgcttgtcgtcattttaacgtttttattcgtcgacttttttgatacggccggtactttggtgggtgttgcatcacaagccggtttgatgaaggataacaaactgccgcgcgcgggaagagctttgcttgccgattcttccgcaactgtggccggagcgatccttggtacatcgacaacgaccgcttatgttgagtcaagcgccggggtagcggccggagcgagaagcggttttgcggcgattgtaaccggcgttttgttcttgctgtcgctgttcttctcgcccgtactcagcgttatcacttcacaagtgacggcgcctgctttaatcatcgtcggcgtgctgatggtggcgaatctcaacaaaatcgactggaccaaatttgagattgcggtgcccgcattcttcacgatgatcgcgatgccgctgacatatagcatcgccaccggaatcgcgatcggatttattttctacccgatcacgatgatttttaaaggcaaagcaaaagagattcatccgattatgtacggactggctgtcgtatttattctttatttcattttcttgaaataggctgtaggaaaaagcgcttgttcatttgaacgagcgcctttttttatttccaattcatcaaaatcggaaccttccgccttcgtttttcgtcatatataagggctgctgcatctatgataaaaagaggtttgtcttgactgtttcacacagcttatgtaatttataaaagtgcttttcatttatgtaaagcttttgaatagaagaggagttgcttatatgattgaagaacatcacaaacgaaacgaagatgatatagaacaagaacctgcttcgaggatgtcgaggaattcccggaaaaaagcgaagaagagcaaggagacgaatccgtctgcagcaaaagtcaaatcggtgatggagagtgtgattgccgctttgttccgttatttcagctttgtgctcgatattttaaagtccccggtgcgcactgcacttgattatgaccggtcttattttaagtattccgttatttcaatgacgcttttagctgttttcttttcgctcggcaacttttatcagctgcttgcgggccgggggagaattctcgggttcggcgtgtcggtgccgtttatggaagtgtttttggttgtgtttatctactgcatggctttcatgttttggatggcggcagcgagctgggctgtatcgaattttatgctcaggtataaagcttcatttttcgatatcacggcaaagtacggctctttactggttccgtttatcgtccccgccgctctgtggatgattttcgcgattatcaacttcacggccgcgacggtgattctctcgatcgtcatctttatgggattgaccttcggcacttttacattgattcaatcgatttatgaaaaaagcgaaaaaccgcggtttgacctgatgtactgcgtgtttaccgtctttttgcttgaattggtattcgttggggcaacttggaagctggtgggcggatacttgctgtcctcgcttatccctgtataaggagatacagccggttctttaagaagaaccggttttttcttaacattaattctgagttgactcataagaataatatgtattatattgtaaccaatcatacgaacggatgggggagtgatcgatggctaactttcttcgaaaagctgtaaagacaaaaaaaggagtatttaatcaggcagctcgcaaaatcaggacggctggacaatttgaaagacctctcgtcatacacgctgagcgatttggaaaaggaacaccggaagctgcacaaattagatgaagttcgtcagcgggatcataaacaccagctctaaggacgttcatttgaacgtcttttttaatggcgtttaaatgctttgaaaccggcagaaaaagggtaaactgatggaagtgagcaatgtcgaaaaattttgtggtgaagcagggccattacaggattgtgtatggagaatttctctagtagaatatgattgctttgcatctaaaggagggatttcaattgcttcactcagcactattgaacggtgtgatcatggttggaattattctggttatcaatattatatatgtaacgtttttaacccttcgcatgatactgactctaaaaggccagcggtatctcgccgcttttatcgggacaatcgaaatgcttgtttacgtcgtcgggctgggtcttgttttagataatttaaatcaaatccaaaacgtgatcgcttatgcggttggatttggaatcggcatcatcgtcggcacgaaaattgaagaaaagctcgctttgggctatattaccgttaacgccattacgaaagagctcgatttggatctgccgaaacagctcagggaaaaaggctacggggtcacccattgggtcgtcggcggacttgagggagacagaacggcgatgcaggttttgacgccgagaaaatacgaactgcaactgtacgaaacgattaaatcaatcgattcaaaagcatttatcatttcctacgaaccgaagacaatacacggcggattctgggttaaagccgtaaagaaaaggagaattaaagaataatgacaaagccgaaaaaaaagcgctttgaagtaacggaaggcgaaacgatcgaaaccgtgttgacgaagatgcaggaagaaggctatacaccggtgcgccgaatggaggagccggtcttcaaagaaacaaaggaaaatggaacgattcaggttgttccgtgcggaagaaaaattatattcgaagggaaattgctctaaacccgaacattagaccaacaaaatatactatcgttcgataatgtcgttgacattatcacagtccgttgttaagataaacatgacatgaaaacacatcctcatataatcttgggaatatggcccataagtctctacccgatgaccgtaaatcatcggactatgcaggaaagtggacaataaactgacatggagatcgcgagaagcggactaactgacgatacacgcgccatgcccggtttgtgttgcttcctacaaatgcaatacatgccgggttttttatttgcgaagaataacagctaaaggtgggacaaaaagatatgcagcctcttcttggtgttatcatgggaagcacatctgactgggaaacgatgaaacatgcctgcggcatactcgatgaactgggaattccgttcgaaaaaaaggtcgtttccgcacatcggacgcctgatttaatgtttgaatatgccgaaacggcgcgggaaagaggcttgaaagtcatcattgccggagcgggcggagccgcccacctgccgggaatggtcgcagccaaaacgacgctgcccgtcatcggtgtgccggttcagtcaaaagcgctgaacggcctcgattcgttgctttcaatcgttcaaatgccgggtggtgtacccgttgcgaccgttgccatcggcaaagcgggagcggtcaacgccggactgcttgcggcgcagattttgtcagcttttgacgaaaagtatgccggaagattggacgaacgaagggaaagcatcagacaaaccgtattggaaagcagtgatcagcttgtataaacaaacgatttttccgggcgcgacaatcggcattatcggaggcggacagcttggcaaaatgatggcggtcgcggctaaacaaatgggctataaaatcgcggtggttgaccctgttccttcatcaccgtgcggccagttcgccgaccttgagattacggctgcctataatgacagggaagcgatacggaagcttgccgaagcgagcgacgtgatcacttacgaattcgagaacatcgattatgatgcgctgaactggctgaaggagcacgcataccttccgcaggggagcgagctgttgctccttacgcaaaacagggagaccgagaaaaaagcgattgcatcagcgggctgcaaagtcgcgccgtaccggatcattcacgaccgggcggaactggaagcgtccgtagcggagctcggtcttccggcggtgctgaaaacttgccgcggcgggtatgacggaaaagggcagtacgtcctgaagggacatgcacaaatcggggaagccgcagctcttttacagcacggcacatgtattttggaaagctgggttcctttcaaaatggaattgtccgtgatcgtgacaagatcggttcacggagagacaaccgtctttccggcggcagaaaacattcataaacaaaatattttattccagagcatcgtcccggcgcgagccgatgaggcgattcaggaacaagcggcagcacttgccctcaggcttgccgaaaagcttcagcttgtcggaacgctggccgttgagcttttcctgaaggaagatggcgtgcttctcgtcaatgagctggcgccgcggccgcataattccggccattacacccttgatctttgcgaaacgagccagtttgaacagcatatccgggctgtctgcgggctgccgctcggcaaaacggaccttctgaaggaaggaatgatggtgaaccttctcggagacgaagtgtacatggctgaagaagaccccgaacttttaaaagaagcgaagctttatatatacggaaagcatgaagtcaaaccgagtcgcaaaatggggcacatcacatttttaagaacacccgacgatgaatggatcgggaagatgacagaaaagtggactgaaagagatggaggacgaaaacaatgatcgaacgttattcaagaccggaaatggctgcgatttggacggatgaaaacagattccaagcatggcttgaagttgaaatactggcttgtgaagcttgggctgagctcggcgtcattccgaaagaagatgtgaaggttttaagggaaaaagcgtcatttgacatcaaccgcatcttcgaaatcgagcaggacacgcgtcacgatgtcgtcgcatttacccgcgccgtgtccgaaacgcttggcgaagagaaaaagtgggtgcactacgggctgacatcaacagatgtggtcgataccgctctttcctatctattaaaacaggcgaacgatattttgctcaaggacattgagagatttgttgacatcttgaaagaaaaagcgaaggaacataaatatacggtgatgatggggcgcacacacggcgtacatgcagaaccgacgacattcggtttgaaactcgccctttggtatgaagagatgaagcgcaacctggaacgcttcaagcaagcgaaagaaggcatcgaagtcggcaaaatctcaggcgccgtcggaacgtacgcgaacatcgatccattcgtcgagcagtacgtatgtgacaagcttggcttaaaacctgcgccgatttcaacacagacgctgcagcgcgaccgccacgccgattacatggctgcgctggcgcttgttgcgacaagcatcgagaaattcgccgttgagatccgcggcctccaaaaaagcgaaacacgcgaggtcgaagaatttttcgcaaaaggccaaaaaggttcatctgccatgccgcataaacgcaacccgatcggttcggaaaacatgacgggaatggcgcgcgtcatccgcggctacatgctgaccgcttatgaaaatgtaccgctttggcatgaacgcgacatttcgcattcatcagcagagcgcatcattctgcctgatgcgacgatcgcgctgaattacatgctgaaccgcttcggcaacattgtgaaaaacttgaccgtgttccctgaaaacatgaagcgcaacatggaccgcacactcggattgatctactcccagcgcgtccttctcgctctcattgataccggcatggcgcgcgaagaagcgtatgacaccgttcagccgaaagcaatggaagcatgggagaaacaagtgccgttccgccagcttgtcgaggctgaggaaaaaattacgtcccgactgtctccggaacaaattaacgactgctttgattacaattaccacttgaaaaatgtcgactacatttttgaacgtttaggcttggcatagaatagaccgcccgcttttacaggcgggggtctaagtgcttaaatatttcaaacattcgggttaggaggccttctgtgaatattgtgaaaaatgaacttttatacgaaggaaaagcgaaaaagatttaccggacggatgatgacaacactttgtttgtcgaatacaaaaactcagcgacggcttttaacggagaaaaaaaagccgagattgacggaaaaggccgtttaaataacgaaatttccagcctgattttcacaaggcttcacgagaagggaatcaacaaccactttgttgaacgaatttctgaaacggagcagctcattaaaaaagtgacgatcatcccgcttgaagtcgttgtccgcaatgtcgttgccggaagcatgtccaaaaggctcggcattccggaaggcacggagctggggcagccgattatcgagttttactacaaggatgacgcgctcggtgatccgttgatcacagaagaccatatccggattttaaaagcagctgagcctgaacaggtggagaaaatcaaatcgattacgagacaggtaaacgaagagctgcagacgattttcgcggcttgcgatgtcagattgatagatttcaagcttgagttcgggctcgataaagacggcgaggtcctgctggccgatgagatttccccggatacgtgccggctgtgggatcaagaaacgaatgaaaagcttgataaagatgtgttcagaagaaatctgggcggattgacggatgcatacgaagaaatattcaaaagacttggaggcatgtaatatgtacaaagtgaaagtgtatgtcagcttaaaagagagtgttttagatcctcaggggagcgccgttcagcatgctttgcacagcatgtcctacaaagaagttcaggacgtccgcatcggcaaatacatggagctcacaatcgaaaaatcggaccgcgaccttgacgttctcgtcaaagaaatgtgcgaaaaacttttggccaacacggtgattgaagattacagatacgaagtcgaggaggttgtcgcacagtgaaatttgcggtgattgtgctgcctggctcaaactgcgatatcgatatgttccacgcgattaaggatgagcttggcgaagaagctgaatacgtctggcatacagaaacaagtcttgatgaatatgacggcgtcctcattccgggaggattctcatacggtgattatttaagatgcggcgcgatcgcccgcttcgcaaatattatgccggccgtcaaaaaagcggctgaagaagggaagccggtgctcggcgtctgcaacggatttcaaattttgcaggagctcggtcttttgccgggcgcaatgagacgcaacaaagatttgaaatttatctgccgtccggttgaactgatcgtccaaaacaatgaaacgctttttacatcttcctacggcaaaggcgaatccatcacgattccggtcgctcacggcgaaggaaacttctactgtgatgaagaaacgcttgccggattacaagaaaacaatcaaatcgctttcacatacggaacggatatcaacggaagcgtcgccgatattgcaggcgtcgtcaatgaaaaaggcaatgtattaggcatgatgcctcacccagaacgcgcagtcgattctctgctcggaagcgccgacggtcttaaactgtttcaatctatcgtgaaaaattggagggaaactcatgtcgctactgcttgaaccaagtcaagaacaaattaaggaagagaaactttatcagcaaatgggtgtcagcgatgacgagtttgccatgattgaatcgattctcggaaggcttccaaactatacggaaatcgggattttttcagtcatgtggtcagagcactgcagctacaaaaattccaagccgatcctgaaaaagttcccgacaaaaggcgaacgcgtcctgcaaggaccgggggaaggcgcaggaatcgtcgatatcggcgacaatcaggcggttgtcttcaaaatcgaatcgcacaaccatccgtcagcgattgagccttatcagggagctgcaacgggtgtgggcggcatcatccgcgacgtcttttcaatgggcgcgcgtcccatcgctgttttgaactctctccggtttggcgaactcacttcaccgcgtgtgaagtacttgtttgaagaagtagtcgcgggcattgccggatacggaaactgcatcggcattccgaccgttggcggggaagttcagtttgacggctgctatgaaggcaatccgcttgtcaacgcgatgtgtgtcggtttaatcaaccatgaagatattaaaaaagggcaggcgaaaggcgtcggcaataccgtcatgtacgtcggcgcgaaaacggggcgcgacggcatccacggcgcaacgttcgcctcagaggaaatgtctgaccaatcagaagaaaagcgctcggccgttcaagtcggcgatccgttcatggagaagctgcttcttgaagcgtgtctggaagtcatcaaatctgacgctttggtcggtattcaggacatgggtgcggcaggcctgacaagttcaagcgcggaaatggcatccaaagccgggtctgggatcgagatgaaccttgacttgattccgcagcgcgaaacaggcatgacgccgtacgaaatgatgctttcggaatcccaggagcgcatgcttttggttatcgaacgcggccgcgaacaggaaatcatcgatatttttgacaagtacgatcttgaagccgttgctgtcggccatgtgactgatgacaagatgctgcgccttttccataacggagaaatggttgccgagcttccggtcgatgctcttgcagaggaagcgcctgtttaccataagccgtcaaaagtaccggcttattacaaagagttccttgaaacagacgtccctgcaccaaaagtcgaagatgcgaaagaaacgcttctcgagctgctaaagcagccgaccattgcgagcaaagaatgggtttatgaccaatatgactacatggtcaggacgaacacggttgtcgcaccgggctctgatgcagccgtcctcaggattcgcggcacgaaaaaagcgctcgccatgacaacggactgcaatgcccgctacttgtaccttgatccggaaacaggcgggaaaatcgccgtcgcagaagcggcccgcaatatcgtctgctccggagcagaaccgcttgccgttacggataacctcaactttggaaatccggaaaagccggagatcttctggcagatcgaaaaagcggcagacgggatcagcgaggcgtgcaacgtgctcagcacaccggtcatcggcggaaacgtctctctctacaacgaatcaaacggaagcgcgatctacccgacgcctgtcatcggaatggtcggactgatcgaagatacggagcatattacgacacagcactttaaagcagcgggcgatttgatttatgtcatcggcgaaacattccctgagttcgccggaagcgagctgcaaaaactgaccgaaggaaagatttacggcaaagcgcctgcgattgacctggaagtcgaacaatcgcgtcaaaaagctcttctgaaagcgatccgctccggactcgttcaatcggcgcatgacgtctcagaaggcggcatcggcgtggcgctggcggaaagcgttatatcttctcaaaggctcggcgcccatgtgacgcttgcaggcgaacctgcattgttattcagcgaaacacaatcacggtttatcgtctctgtgaaaaaagaccatcaagaagcgttcgaaaagcttgtcaaagacgccgatctaatcggtgaagtaacgtcagacagcgtgctggctgttcaaagccaggaaggacaacaatggattcatgcgcagacagaagagctcgaaagcgcatggaaaggagctatcccatgcttgctgaaatcaaaggcttaaatgaagaatgcggcgtatttgggatttgggggcatgaagaagcaccgcaaattacgtactacggccttcacagccttcagcacagaggccaggagggcgccggcatcgtcgcgacagacggcgaaaaaatgtccgcccacaaaggccaggggctgattaccgaagtttttcaaaacggtgagctcaaaaaggtgaaaggaaagggagcgatcggccacgtccgctatgcaacggcgggcggcggcggcttcgaaaacgtccagccgttccttttccattcgcaaaacaacggcagccttgcgcttgcgcacaatggaaacttagtgaacgccactcagctaaaacagcagcttgaaaaccagggcagcatttttcaaacgtcttcagatacggaagtgctcgcccatttaattaaaagaagcggccacttcgagctgaaagatcaaatcaaaaacgctctttctatgctgaaaggcgcttatgctttcctgatcatgacggaaaaggaaatgaacgtggcgcttgatccgaacggactcagaccgctatctgtcgcaatgcttggcgacgcgtacgtcgtcgcttctgaaacgtgcgcatttgatgtggtcggcgcgacatatctgcgcgatgtagaaccgggcgagatgctgatcatcaatgatgaaggcatgaagtcagagcggttctccatcaacatcaaccgttcgatctgcagcatggagtacatttatttctcaagacctgacagcaatattaacggcattaacgtccacagcgcgagaaagaatctcggcaaaaagctcgccgaggaatcaggcattgaagcagatgtggtgacaggcgttcctgactcaagcatttcagcggcgatcggctatgccgaagcgacgggaattccttacgaactcggattgatcaaaaaccgctatgtcggcagaacgttcattcagccgtcacagtcgctcagggagcagggcgtgagaatgaagctgtcagccgtccgcggggtcgttgaaggaaagcgcgtcgtcatggtggacgattcaatcgtgaggggcacgacgagccgcaggattgtgacgatgctgcgcgaagccggagcgacggaagtgcacgtcagaatcagttccccgcctattgcccatccgtgcttttacggaattgacacatcgacgcacgaagaactgatcgcgtcctctcattcagtggaagaaatccgtcaggaaatcggcgccgatacattgtcattcttgagcattgaaggactcctttccgggatcggaagacagtatgaaggtgaaaactgcggccagtgcatggcctgttttacaggaaaatatccgaccgaaatttatcaggatactgttcttcctcacgtgaaagaaatcgttttgacaaaataaaccggccggcgcgattgaagcgcctggcctgctgaaatgaataaagggcagcagaggcaatgcggctgctcttttgattttgaatatcacgaatggacaagcgcggaataaggagtgattgtgttgtctgaaagctataaaaacgccggggttgatattgaagccggatatgaagccgtaaaacgaatgaaaaaacatgtggaaagaacgaagcgaatcggcgcaatgggcggacttggcgggtttggcggcatgtttgacctgtcggaactgccgtacaaacagccggttctcatttcgggaacggacggtgtcggcacaaaactgaagctcgcttttgcgatggacaagcatgacacgatcggcatcgatgccgtcgcgatgtgtgtcaacgatgtgctcgctcaaggagcggagccgcttttcttcctcgattaccttgcggtcggaaaagccgatcccgtcaaaattgaagagatcgtaaaaggcgtcgcagaaggctgcgtacagtcgggatcagcgcttgtcggcggagaaacggcggaaatgccggggctttatacagaggatgaatacgatatcgccgggttctcggtcggagctgccgaaaaagatggcatcgtcacgggcgaaaatatcagcgaagggcaccttttaatcggactttcttcaagcggccttcacagcaacggcttctctctcgttcggaaagttcttcttgaagatgccggtctgaaccttgatgagacgtatgcaccttttgaacggcctcttggcgaagagcttttagagccgacgaaaatctatgtcaagcctgtccttgaagcggtgaaatcaggcaaaatcgccggcatggcgcacgtgaccggcggcggttttatcgaaaacctgccgcgcatgatgcccgatggcctcggcgttgaaatcgacatcggctcctggcccgttcctcctatcttcccgttcattcaggagaaaggcggcctgaaatccgaggaaatgtttaatgttttcaatatgggaatcggctttgttcttgcggtgaaagaagaggatatgacagacgtgatccaaacgctcgaaaacaacggtgaaaaagcctatctcatcggcagagtgaaagccggaagcggcgttgtgtttggcggtgccggtctttcatgaaaaaattcgcggtatttgcatcaggaagcggaacgaattttgaagcaatcgaaagaagaatgagagaagagaactgggatgccgaaattgtcctcgtcgtctgtgacaagcccgatgcgaaagtgcttgaaagggcggaaaaagccggaatcccgtcgttcgccttccagccgaaatcgttcgacaataaagctgcatttgaacaagtgatcgttgaacagctccgccttcacggagcggaatggattgtgctggcggggtatatgaggctgatcggcgatacgcttctttcggcttaccggaataaaatcatcaacatccatccgtcgctcctgccggcgtttcccggcatcgacgcggtcggacaagcgtacagagcaggcgtgaaagtggcaggcatcacggttcactacgttgacgaaggcatggacaccggtccgattatcgcccagcgcgccgttgagcttgaaaaaagcgaaacactcgcgtctcttgaagaaaagatacacaaattggagcatgaactttatcccgaagtaatcaaagagcttcttgaactaaatggcagaggtgaaaaggaatgacgatcaaacgcgcattaatcagcgtatctgataaaacgaacattgtcccttttgtaaaagaattgacagagcttggcgttgaagtgatttcaacagggggcacaagcaaacttcttcaggaaaacggcgttgacgtcatcggcatttctgaagtgacgggctttcccgaaatcatggacggccgtctgaaaacccttcatccgaatattcacggcgggcttcttgccgtacgcggcaacgaaaagcacatggcgcagctgaatgagcagggtatccagccgatcgaccttgtcgttgtcaatttatatccttttaaagaaacggtttctaaagaagatgtcacattcgaagaagcgattgagaatatcgacatcggcggccccggcatgcttcgcgctgcagcgaaaaaccaccaggacgtggcggtcatcgtcgatccccgcgattacagccctgtgctgaacgacttgaaagaaaacggcagcgtctctcttgagaaaaaacgcgagcttgcggcgaaggtgttccgccacacggcagcatatgacgcgttgatcgctgactatttaacaaatgtaaccggtgaaaaagagcctgaacagttcaccgtcacttttgagaaaaaacaatcgctccgctacggcgaaaatccgcatcaggaagcagtcttttatcaaagcgcgctccctgtcaaagggtcgatcgcttcagctgaacagctgcacggaaaagagctttcctacaacaacatcaaagacgcggatgcggcacttcaaattgtccgcgagttcaccgagccggctgcggttgccgtcaagcatatgaacccttgcggcgtcgggacgggcaacacgatcgaagaggcgtttaacaaagcatacgccgctgacgaaacatcgattttcggcggcatcatcgccctgaaccgcgaagtggacaaagcgactgctgaaacgcttcacaaaatctttttggaaatcattatcgcgccggcattcagccaagaagcgcttgatattttaacatccaagaaaaaccttcgcctcttgaccctcgatgtcaatcagcctgtgaaaaacgaaaaacagctgacatctgttcaaggcgggctcttgattcaggatctggatatgcacggctttgacgacgctgacattacgattccgacgaaaagggagccgaccgaacaggaatgggctgacctgaagcttgcttggaaagtcgtgaagcacgtcaaatcgaatgcgattgtcctggcaaaggacgatatgacgatcggcgtcggcgccgggcaaatgaaccgcgtcggctcggcgaaaatcgcaattgagcaagccggggagaaagcaaaaggaagcgcgctcggatcagatgccttctttccgatgcctgatacggtcgaagaagcggctaaagccggtgtgacggcaatcattcagccgggcggctcggttcgtgatgaagattcaattaaaaaagcggatgaatacgggatcgcgatggtgttcaccggaatccgccatttcaaacattaagggagtgaccagcgtgaacgtattgattatcggcagaggcggcagggagcacacgctcgcctggaaagcggcgcaaagccctcttgtcggcactgtatatgcggcgcccggcaatgacggaatggccgggaccgccgtactcgttgatcttgacgaaggcaatcacgaagggcttctcgctttcgcaaaggaaaacaatatcggactgacgatcgtcggtcctgaggtccctttaatcgaagggcttgttgatgcatttgaagaagcgggccttccggtgtttggaccgtcgaaaaatgcagctgtgattgaaggaagcaagcagtttgccaaggatcttatgaaaaaataccagattccgacagcagaatacgaaacgtttacatcttttgaaaacgcaaaggcgtatgttgaggaaaaaggcgctccaatcgttattaaagccgacgggcttgccgccggaaaaggcgtcacagtcgcgatgacagccgaagaagcggttcagtgtctgcatgactttttagaagatgaaaagttcggcgaagcaagcgcatctgtcgtcatcgaggaatttttgagcggtgaagaattttcgctgatggcttttgtcaaaggtgagaaagtgtatccgatggtgattgcacaggatcacaagcgggcatttgacggagacaagggcccgaatacagggggaatgggcgcgtattctccggtgccgcagatttcggatgcggtcgtcgaagacgccgttaaaacgattttggagccggcggccgaagcgatggttaaagaaggccgttcgtttacgggagtcttgtatgccgggttaatgctgaccgaaaaaggaacaaaagtgatcgaattcaacgcgagattcggggatcccgaaacccaggtcgtcctgccgcgtcttgaatcagaccttgtccaggtcttggttgatctcctcgcagacagagaagtggagctgaagtggaaggatacggcggcagtcaccgttgttcttgcatctgacggctatccggaaagctatgaaaaaggcgcgccgatcggcacgcttgagcctgacatggagcagaccgtcgtctttcacgcaggcacgaaaaaaagcggcgatcagtttgtgacgaacggcggccgcgtcgccaatgtcaccgcgtttgcagagacgtttgatgcggcaagggaagcagcctatcaagcggtggatcgagtaagaaaaccggggctgttttaccggatggacatcggctcgcgtgcgctcaaggcagcacagaaataataggtgaagagacagagcgggagcacccgttttgtctctttttttgagctcaatttttttggatgatcttgatcatcgattcagccatcaattcgggcggataaggcatgccgttttcaagacaccatgcggctgtgcccgcgaaggcggaaatcacaaaccgccgctgaatgtcgagaggcactgagcggtcagtatcagcagctgccgtttttttgattcccgtcaaaaagctgtcattccaaaaatcattgagcagctccttaatgttcagctcatatcttctgttgatgataatcgcaaaatcgccgctgttctgttgcaaatgatgataaaagcgcagcacataccagtatgcttctggctttttcccgctgctatctatatcaagcggcgaaaaaatatcctctttcatcgcctcaaacatatccctcatatgttgatgaagcaaatcgtatttatcttgataatgctgataaaatgtcgttcgattcaagtttgcccgttgcgtaatatcctgcacagagatttttccccattctttttcagcaagcagttcaaacaaggctttttttaagtttgttttcgattttgtgatccgcttgtccccgcggtagctgtcagccaattcagccgcctcctcaatcactttttcgacacttctttgccatttgttggttgaatggccagatggaatctattaatttaaaactaacatattgaacttcatgaatcagctgacaagcaaccgaaggagtgaaagcgaatgagtcaaacaaaacagcagaaccccattcagaaagcgctgattaacggaaagaacagacaagacccgtatgatccgtttccgtggtataaaaaaatgcgcaccgaatcaccgattcactatgatgaagacagcaaagtgtggagtgtgttccgctatgacgatgtcaaaagagtgatcagcgacaaagactttttttcaaatcaattccctcagcttggaactggcaatacgtttgcgaaaacgatgatcagcatggatccgccgaaacacacgagaatcagatcgatcgtcaacaaggcttttacaccgcgcgtcatgaaggagtgggagccgcgcattcgcgaactgacgaatgaattgctcgctgatgtccgcggcagggaagagatcgaccttgtacaggatttttcatatccgttgcccgtaatcgtcatttcggaattgctcggcgttccttcggtgtataagcatcatttcaaagaatggtccgacctgttggtcagcctgccgaagagcgatcggccggaagatgtgaacgagtggaaaaacatcagggaccaaggcgaagaagagctgaccgcattctttgaaaagatgattgaagagaaaagacaaaacctcggcaatgacctgatttcgcttttgatcaaagccgaacaagaaggggacaagctgtcccctgatgaattggttccattttgcaatctgctcttgatggcggggaatgaaacgacgacgaatttagtttcaaatgcggtctacagcaatctcgaaacaccgggcgtgtatgacgagctcgccaggcatcctgaactgattccgcaggcagtcgaggaagccgtccgtttccgggcgccagcgccgatgattgtgcgcttcgttaaacaggataccgagatcagaggagtaagcttgaaaaaaggagaaggtgtgatcgctttccttgcttctgccaaccgtgatgaaacgaaaatttgagagggcgcacgaatttgatattcaccgccatccgaacccgcatatcggatttgggcacggcatccacttttgtttgggcgccccgctcgcaaggctggaagcggcgatcgccattgaggcgctcttaaagcagtatgcctcgatggaaaagcttgcggtcgtgccgatggccgacagcagcatgtacggcttgaaacatttccgtctgcgggtgaagtcagcaggggaaacggcgcctaactaattagaaaagcaccgaaaaggtgctttcagcgtgtcgacaaaccctcgcattcgttgtcaggcctgctaagtcggtgctcacgaatagaggaaggatcggcggctaaccgcccaggcgtcctgcctgaacgccgccgtcatcacctcctgtgaaagtccgctccgatgctcggccttcctagactgcaaggttttcaatcacgctgaaaaggtgacgaaatcctaaaactttaaaccgttttaggatttcgtcaacaatctgccaccttctttcccaagaaggtgtttttttacggacagggcatttctttcattgcataagccggtcagcaggaatttgactggataagcctcgtgctttaaaatgaaagtaataaaaatgaatactccaaaggggagtagctgtcacagtaaagtcgtcattacgggatgtcctagatcctcggctttactggcaatctaattgttagcgagacctttgccaaatcggtggagttttttcatttttatcaaaagggaaaggagactgaccgtgtctaagctcggaaaatggctgaagcgtgaattggtgaagaaaggtctgcctttggcgaaagaaaaattaattccgattttgaaagaaaaaatgaaaaagaaacgataaggaggcaaacaatgaaaagaattcttatagttcttgccggaattggccttttaggtgcgggcggatgcggaatgcttgatcaggtgaatgacggattgaactatacaaatgaagcggccggctatatccaaaaagtgaagacatttgcggaggaggcgccttccttggctgaacaggctgtaaacgacacgggtgcaaaagaaaagctggaaactcagcttgagtctatccagcaggctgcagccgattttaatgaattaacccctcctgatgccgcagccgaggttcataacaccatcgagaagcataatgaaacactgcaaaaaagcgctgaggatgttttgaaaagtgttgaggaaggaaaattaacagtcgagaagctggagcagtcagaattggtgcaaagcgctcagcagatcagcgatgtgatgggccagattgaaaaattgaccgaatagaaaaaagcatcccggtttgggatgtttcggcttgtcgacaaagtcataaaaagtggcttcatcgacaagcttttttaaaaaaatgtgagtggaatctagattatgttgcccaagcactcaaaagatcagcgtaaacagcttgaagtcgttgccttaagtgaacttgtccctgaagatcaactggtcaggaagatggaagaagccatggatttttcatttatttatgaaaaagttgcccctctttattcttcaaaagcacgtccaagcattgatcccgttgtattgatcaaaatggttctgattcaatacgtgtttgggcatcgctccatgcgcgaaaccatcgaacgggtttttgcggatttaaaacacaagcgtggcctgcgctggacaaccctgcggggaaagaaaaaattgtccatgcaggcgatgcttgttttcgctgccatgaatctaaaaaactggcgaattggacgtggaaaggccctaatcgccagccttttcatcgaaaaaacaaaataaactggacaaaaataggtcggatcttagaaatccgacctattttgtcaacggtctgaaagcacctataaaaggtgctttttatgattgttcgccagtctctccctgttgcttcatatacgtttggcaaacatatgtcatgggacaaaatcgtaaaatgccggaagcggccttcatcgcccccataaacatgcagaaaagcgtcattctgcaccacggttttctcgtaaactttgccgctgccgccgacaggatcgtcagtccgcaggcaatccgaaaaacggcgtcaaacagtccgatgttttgcttcatactttattcctcctatttaaataattaaataaagtgttttttcaaaaaattgtaacggattggtaatgcgtgacgatagtaaatgtgttaacataggatcattacatgtaaaggagagtatgtgaatgtccgaacgcaccttaatttggaaaaacaagcacatcagatcgcaagttgatgttgtaagttcaaggctgcagccaacgctccttttacgaaatgcatctgtactgaacccgtatgtaaagcaatggattccagcaaacgtatggattcatcatgacagaatcgtttatgtcggccgtgacttgccgaagacggctgttaaaactacaatagattgtgaaggaaaatacattgtacccgggtatattgagccgcatgtacatccttttcaaatttataatccccaaactttggccgaatatgtgtcacagtttggaacgaccacattcgtaaatgacaacttgtttctgcttttacattgcggaaaaaagaaagcgttttctatactggaggaactgaaaaaacagcctgtccactactattggtggtcaaggtatgacttgcagaccgaagtgttgaatgaagatcaaatcttatcgatcgattaccgaaaacattggggagaacacccggatgtcatccagggaggagaaatgacaggctggccgcgccttttggacggcgatgatctgatccttcattgcatgcagtgcacgaaaagaaggagaaagcggatcgagggccattttccgggggcatcggaaaaaacgctgacgaagatgaagcttttcggcgctgacgccgatcatgaagccatgactggaaaggaagtgctgaagcggcttgaacttggttaccacgtcggcttgaggcagtcttccatccgccctgatttgcgaaaaattttgcgcgagctgcacgaagaaggctttcaccattatgaccatatgttttatacaacggacggcgcaacgccgaacttttataaagaaggcatgacaaacaagctgattgaaatcgccatcgaagagggcgtgccgctgatcgacgcctataatatggcttcgtttaatatcgcgaagtattaccatatggaggacatccttggggtggttgcaccgggcagatacgcgacgctcaacattttgaatagccctgatgaaccgaatccggagacggttttggcaaaaggtcggctgatcaaatcaggcggcataaatatgaatgcgttttcagttccggattggcaaaaagggggtcttgtccctctgaacctttcatatgatctaacgatggatgatttgcagttttccatgccgctcggcttgaaaatgaggaattccgtcattatggagccttatacgattgagattgacaactctgtgaaccagctttcttttgatcatgatgaaagctatctctcgctgttcgacaaatacggaaagtggcgtgtcaatacgatgctgaaaggctttgcaacccgcatccaaggtttcgtcagctcctattcgacaacgggagacattatcgcgatcggcaaaaacaaggaagacatgcttttggccttcaaacggatgaaagaaatcggaggaggtatcgtattagcggaaaacggaaaaattctgcacgaaattcctcttcatttaagcggcggcgcatcaattgagacgtatgaaaaggtgcttgaaagggaaaaagcgttaaaagagcttctgtttgaaagaggctatacgttcgacgacccgatctacaccctgctctttttgcaaagcacccatctgccttatatcagggtgacgccgaaagggatctttgatgtgatgaaaaaaactgtactctttccatcgataatgcgttaaatataaaagagcgggagctaatctatggtgaatcgatatgtaagagtactgctttgttttgcttcgcttttactgcttgcatcgtgccagtcgcaggaacagcaggaaaaggaaaagaacattcatccgctgacagggttgaaggcggacggagatattcggcagcggcccattgccgttgtggtgaacaatcattcaaaagcaaggccgcagtcgggattaagcaaggctgacattgtcattgaagctctcagtgaaggaccgatcacacgattgttggcgatctatcaaagcgatatgcctgaagcggttggcccagtccgcagcgcccgggagtatttcattgatttggctctcggttttgacagcatccttgtgcatcacggctggagtccgggggcaaaagaccgcctgttgaacggcgacgccgatcatatcaatggaatggatcacgacgggaccctgttttggagagccgattttcgggaagcgccgcataattcgtacacatcatacaaaaacgtaaagcaagcagcagatgacaaaggatatgccatcgaaacccgcacagaaccgctcacttttaaagcaagccctgataaaccttcggatgcgctttattctatacggttagattatggaacaaaatccgttacaaaccgtgtcgaatatggttatgataaaaaggttgaaggctatgtgagaaagtcagacggcgttttgacaacagaccttgaaacagaagaaccggttgttcttcaaaacattctaatagcggaagccgaacatcatatgaaagatgcgtacgggagaagggatattgaccttcgttcaggcggaaaaggactccttctgcaaaacggggaagtccatcggatcagctggaagaacgaaaacggccggatcataccgacggcggacggcaaaaccgttccgttcgtgccgggaaaaacgtggatcaatatcgttcccgatctcagcaaggtttctattagcaaaggagaaggtgtgtaaagatgcagatcgataaattgcgcgggagagagctggaccagctttttcaatccatactatcactaaaagatctcgaagaatgctatcgttttttcgatgatttatgcacaataaatgaaattcaatcattggctcagcggctcgaagtagccagaatgctgcgcgacggcaacacgtatcataaaattgagacggaaaccggagcgagcaccgcgaccatttccagggtaaagcgctgcctgaactacggaaatgacgcttatatcatggcgctggaccgcgtcaaagcaaatcaatctgaatcatcttcatgatgtcatgaaaccgcctggctcagggcactgagcaccggcggtttttttgtgcttctgcccgtttatcgtttatttgttatccgtttttcgaaaggggctgaatttgttataatatttaaatggtaagaacgcgaatggaggagctttttcatgtacgatattaccgagtggaagcacgtctttaaactcgatccgaataaagatattacggatgatcagcttgaacagctgtgcgaatccggaacagacgcggttttgatcggcggaagcgaccatgtcacagaagatgacgtccttcggctgatgtcaaaggtgcgccgctttttagtgccgtgcgttcttgaagtatcgacgatcgatgcgatcgtcccggggtttgacctctattttattccgactgtgctcaacagcagggatacagactggattgccggcttacataaaaaggcgatgaaagaatacggcgagctgatgtcgccggaagagattgttgttgaagggtactgtattttgaatcaggactgcaaggctgccgctttgacgaacgcagataccgagcttgacattgaggatattaaagcgtacgcccgcgtagctgaacatcttttccgccttccggtcttttatcttgaatacagcggcatgctgggtgattcagagaccgttaaggaaacgaaagccgtgcttcaggaaacgacgctgttttacggcggcggcatcaaagatgcggagacggcggttaaaatggctgaacacgccgatgtgatcgtagtcggaaacgcgatttatgagaacttcgaagaagcgctgaaaacggtacaggccgtaaaaggatgagcacaacgaaccggattggtttataatagaacatatgtttgaataggcggtgaacggaattgaattacattagcgaccaattattaagcggattgaacaagatgcagcaggaagcggtcaaaacgacggacggtccgcttttgatcatggcaggagcaggaagcggaaagacgcgggtattgacgcaccgcattgcgtatttaatggcggagaagcgcgttgccccgtggaacatactggcgattacatttacgaacaaagcggccagagaaatgaaagaacgtgtggaaagcattctcggaccgggagcggatgacatctggatttcgacgttccacagcatgtgcgtcagaattttgcggagagacatcgacagaatcggcatcaaccggaatttctcgattcttgatacgtctgaccagctttccgtcattaaaggaatcctgaaagaaagaaacatcgatccgaaaaaattcgatccgagaagcatactaggatcgatcagcagtgcgaaaaacgagttgatcgccccggaagaatacgagaaaacagccggcggtttttttgaacaagtcgtcagtgatgtctacaaagattatcagaagaaactgcggaaaaaccagtcgctcgattttgacgatttgattatgacgacgattgtcctgtttgaccgggtgccggaagtgcttgaatactaccagcggaaattccaatacattcatgtcgatgagtatcaggatacgaacagggcgcagtatttgctcgtcaaaaaaatggcgcagcgcttccaaaacatctgcgttgtcggggactccgaccagtcgatctacagatggcgcggagcggatatcgccaacatcctgtcgtttgaaaaagactatccgaatgcgagcgtcattctgctcgaacaaaactacagatcgacaaagcggatattgaacgcggccaatgaagtgattcagaacaactcaaacagaaagccgaaaaacctctggaccgaaaatgacgaaggggcgaaaatctcctacttcagaggcgacaacgaatttggcgaaggccaatttgtcgcgggcaaaatcagggagctcgtcggctctggaaaacgatccttctcagatatcgcgattttgtaccggacgaacgcccagtcgcgggtcattgaggaaacgctgatgaaggcgaacatcaactacaacatcgtcggcggcacgaagttctatgacagaaaagaaatcaaggacatcctcgcgtatttgcgcctcgtcgcaaaccctgacgacgatatcagctttgcgcggatcgtgaacgtcccgaagcgcggcgtcggtgcgacttcagtcgataaaatcgcggcctatgccgacatgaacggtatgtctttatttgaagcgctcggccaggttgactttatcggcctcagtgctagagcggccaacgcgcttgatgagttcagacagacgatcgaaaacctgacgaatatgcaggaatacttatccgtcacagagcttacggaagaaatccttgaaaaaaccgaataccgcgaaatgctgaaagcggaaaaatccttggaggcgcagagccgccttgagaatatcgacgaatttctctccgtaacgaaaaactttgagcagcaaagcgaagacaaatcgctcgtcgcttttttgaccgatttggcgctcatcgccgatatcgatcagcttgatcagaaggaagaagagaccggaaatcaagacgcggtcatcttaatgacgcttcatgctgcaaaaggactcgaattcccggtcgtgttcctgatggggcttgaagaaggagtgttcccgcacagccgctccctgatggaggaagcggagatggaagaagagcggagactcgcgtacgtcggcatcacgagggctgaggaagaactttatttaacgaacgcgcggatgcggacgttgttcggaagaacgaatatgaacccggaatcaaggttcattgcggaaataccggaggaattattggacaatctaaacgagaagaaaaaagatctgaaaacgccgtttggaagaaagcccgagcggagaggccccgttacccgtccggctgcatcgtacagcaaaaccggcggcgacggcgtcaattgggcagtcggcgacaaagcctcccataaaaaatggggcgtcggaaccgttgtcagcgtcaagggatccggcgaatcgacagagcttgacatcgcctttccgagcccgaccggagtgaagcgtcttctcgcggcctttgcgccaattgaaaagcaataatggcaaaagacctgaaatgaaaggacgaaaccaatggaaaaagaagcagctaaacgccgtgtggaacaactgcatgcattgattaacaaatacaactacgaatatcacacccttgacgatccaagcgtgcctgattccgaatatgacaagctgatgaaagagctgattgctcttgaagaagagcatcccgacctgaaaacgccggactctccttctcagcgcgtcggcggagccgttttggacgcctttcaaaaagtgcagcacaaaacgccgatgctgagcctcggcaacgcgtttaatgaagaagatctgcgcgactttgaccgccgcgtccgccaggcggtcggagacgttgaatacaacgtcgagtttaaaatagacggtcttgctgtttcactgcgctatgaaaacggcgtatttgtcagaggtgcgacgagaggcgacggtacgacgggcgaggatattacggaaaatttgaaaaccatcagaaacattcccctcagaatgaaacgcgatctttctattgaagtgcgcggcgaagcttttatgccgaagcgctcctttgaactgctgaacaaagcgcggatcgaacgtgatgaagagccgttcgccaacccgcggaacgccgctgccggttcattaaggcagctcgatccgaaaattgccgcgaaacgaaatctcgatatcttcgtctacagtatagcggagcttgatgaaatgggcgttgaaacgcaaagccagggactcgatttcctcgacgaactcggcttcaaaaccaatcatgaaagaaaaaaatgcagcacgatcgaagaagtcattgagattgtcgaagagctcaagacaaaacgcgccgacctcccgtatgaaatcgacgggatcgtcattaaagtcgattcccttgaccagcaggaagagctcggctttacggcgaaaagcccgcgctgggcgatcgcctacaagtttcctgccgaagaggttgttacgacgcttttggacattgaattaagcgtcggccggacgggcgcagtgaccccgactgcgattctcgaacctgtaaaagtggcgggaacgaccgtccaaagagcttctctccacaacgaagatttaattaaagagaaggatatcagactgctggacaaagtcgtcgtcaaaaaggcgggagacatcattccggaggtcgtcaacgtcctcgtcgaacagcggacgggcaaagaaaaagaattcaacatgccgaaggaatgcccggaatgcggaagcgagcttgtcagaatcgaaggagaagtcgcgcttcgctgcattaatccggaatgtccggctcagatcagggaaggcctgatccattttgtttcccggaatgcgatgaatatagatggtctcggcgagcgcgtcatcacccagctgttccgcgaagacctcgtccataatgtcgccgatctgtataagctgacgcgcgagcagctgatcaatctcgagcggatgggggaaaagtcgaccgacaacttattgaattcgattgaaaaatcgaagaagaactcattggaacggcttctcttcggactcggcatccgcttcatcggcgccaaagcggccaagacgctggcgatgcattttgaaacgctcgataagcttaaaaaagcgacaaaagaagaattgatcgaagtcgatgaaatcggcgacaagatggcggacgccctcgtcacctattttgaaaaagaagagattctgaagctgttggacgagcttgaagaactcggggtcaacaccgtgtataaaggcccgaaaaaagcggccgctgaagcgagcgattcgtattttgcggggaaaacgatcgtcctgaccgggaagctcagcgagatgtcgcggaatgacgcgaaagcggaaatcgaagcgctcggcggaaaaatcacaggcagtgtaagcaaaaaaaccgatctcgtcattgccggcgaagcggcaggcagcaaactggcgaaagctgaagacctaaacatcgaagtatgggatgaggcaagactgatcagtgagctaaagaaataagaggagtgttttctattgaaaaagatattatgtttggcggctgctgcgggtatgctcatgctctcagcctgtgcgccgaattttgggggagaagaagagcaggagatggtgcagaaaacggataagtcgaaagaaaaagccatcattccgaaatacaacatctccgattcttattataaaatggttcttcctttcaaggcggggaaagcccgcggcttgacgaccgaacgcctgaatacgcggctggatatcgatgaatttgagacaggcatgatgcgccttgcgcaagattcattttctactgacgattacctttttcaagaaggacaatacctggatgaggatacggtatcgagctggctcgcccgcaaaaaaacgggggacgacttgaaaaaagcggagaaagacgataaaaacttcaaaaacctcggactgaacccggccctttccggaagcggatcaacagagaagcaaaacgaagaaagcccgatatacctcgcccatatgcttgagcacgactacctcgtccgcaaagacaaggatacgattgagctcggaggcgtcgtgatcggccttgcgctgaactctgtccactactaccgcgaaaatgtcggcgacccgcaaaaagaagtgaccatcagcgacaaaaagctgaggcaggaaggcgaaaaaatcgctgaagaagtggcgaaacggatcagaaacatggatgatctaaaaaatattccgctgacgatcatgctttacaagcaggcgcctaagtcatcgatcgtccctggaaactttatcgccaaaaccgatgtgaaagcagggacaagcgagatcggcggctgggataaaatcaatgaagagtacacgttcttcccttcaacagaaggttcggagaagcatccggatgacgcggagctcttcaaacgctttaaaaacaaagtcgatacgtattttccaaactacacaggggttgtcggcacggctctctataaagacgaccaaatgcaggacatgaaaatcaacatcccgatgcagttttacggcaaaagcgaagtcatcgcctttacccagttcttgaccggtgaagtgatggactactacggcaaaagcggactgaacgttgagatcaacattaattcgtcagccgggcaggaagccgtcattctgaaaaagccgggagacaaagaaccgaccgtccatatttatgattcataaaaaagaagcagccctttggctgcttcttttattacgcagaaaagggatatggagacctatcattcatttatgaagcaccaacaaatttttcttaacgtattctgaataaaatactattgcaaaattaggacacaactcttataattgattatacagaatatagtatattgttttaaggaagattaattatgtgggaaaaattttactctaaaaatggtttggcagctaaaaatattgctaaagaattgatgaatatcaaagcaggtgaaaaaattccccgtatctcagactactgtcataagttatccatcggcagggggactgtgcaaagtgcgctgaatttattagttgatatgaaagcgattcaattggaggctagagggcatttaggaacgtttttggtaagtaaggataacaatttattacttgagattgcaggtattgcaccattaatcggctcaatgccacttccgtattcaagaaaatatgagggtctggcaacagggattgtggaagggtttgaatcaaccggaaaaacagttaacttgatctacatgcgtggcggagtgaatcgaatcgaagcagtccgaacaaaaagaagtgattttgcaattgtttctaagatgacggcagatcatatcatagtagaatatccaaatttgaaaattttcaaaaaattcggggaaagtagttatgtatcttcccataaaatcttcttagctcatccagatgaggaaataggcaaggatggcgtaagagtaggtgttgatttggaatctctagatcagaaacaattaacattggctgaatttgaaaacaaaaatgctgaatttgtcaatgtgaattatatgcagctctttgatatgcttctttcaaaacaaattgatgcagcagtttggaatgctgatgacaaaagaatgattcaaacgtttaaagcaatcgattttttttcaccgaaagcaaagaaaatttccaaggatacaacagaagccgttattgttattgaaggagacagagaaaaagaaatagcagaaaagtggaatttggttaatgagaaacagatattagacacccaaaaaagcgtagaaaagggagagaaaataccgcgctactaaaatgccggcccatccgacttgtcattcaataaatgaggcgatgggttagcatttaaaatctaatttaaaatactaaatacagtatattggaggaactggcgtgaatcaaatacagctggaagaaaagttgtctattttactaacgagtcgagtgattacaaaaaatgctttcaacacaacattgaacacatttgttttcttatcagaaaagctgaaaaaggaggtgatcaaagactctgaaatgttttggacgcacatggcgatggctttaactagaattaaggagggagaaagcgaagaagttcctgcaaatgccatcatcaatgaaatgtatgaaacaccatataaaagtgcaatagaagaagtgatagactttatacattcactggcaggtctagaacttccagaaggtgagctcgtttatttttatcttcatcttcataaagtcatagaatctaataaataggaggattttattatggtgagaattgtaataggcggacagttgaaaaaacaagcgattgaaaaacttgttaaagaaattgggggaaataatgtagaagtattggtcaaaggtgatttggacgctgttatggctgtgaaaaacaataaggcagattattatattggcgcctgtgaaaccggatctggcggtgctcttgcaatggcaattgcattattaggtaaagataaatgcgtcaccttggcttctccaagtaccataaaaaacaaggaagagatcgagaaggaagtagaaagcggcaaaattgcttttggtttcaccgcttcaacatcacaaaatatattaaacattttaattccttatttattaaaataagcgaacttttccaatatatattttgttatacaggcttaaatttttttcagttaaggaaagcgctttcttggatgctcgaaataaaagaagcgtggatgacatgatgtacagaaggtgagaaaaatcatagaggtgaataatgtaatggacctttctttgattcaatgtcttgtcatagcggctgttggtgcattaggttctatactagtcaatcgcggggtagctgtatttaatgatggtttgcgtccgattatgcccgaatacctagaggggagaatgacaagaggggagcttgctgcaacaagctttgcattaagttttggattaatcatagggtttggtattccgctttccataggagcaacaatcattattggacacagtattttattggcttgtgacatcattggcatttggactccggaaaacaaaataggcatggcaactgcaggagttattggtgccgtttatagtattgggatcgttttaggattgcaatttgtagtagatttatttggcaagtttcccgtgaattttatagactctttaagtcttattggccagcctattattatcgcatttacagtatttccagctgtagcggtcggatatcagcacggtttaaaaaaagccgccgtcactgcaattgtaactttagcttcttttctcttattcgaaaagtttggaacatttcaagcggcgggatatgaaatttcgctcagtcctgaagggatggctttattagcaggaatgttaatgatgatttattatgcagcgagaattagaggaggagatgaatctactaatgcaaatttagtgaatatatttaatgagcgtgtaaatcgaattaagaaaaaccgctggttattagctcttatgggagggcttgtttctttaacatcatctatgctgattttagcagtggatgcaatgcctcaagcattgattaataaagagctttacacagaggcggcaatcgctacatttgcacgtggaattggtttcatccctttagttttttcaactgcaatcgtaacgggggtttatggtttagctggtaccacactggtatttgcagtgggtcttattttcagggatataccgattttagcatttctgttgggctttttagtcatgtatttagaggtcatatcattatccgcagtatcaaaaagcatggacaaactgcctggtgtaagggagatgggagagcatatccgcacttcgctgtcagatgttctaggaatggctatattaattggcagtgcgatggcaggggaaaaaattgctcctggcattggcttcttctgggttattggattttatttaataaaccgaatagcatcaaaaccgcttgttgaattggctgtcggcccaattgcagttatattgttggggattgtcgctaatcttctctatgcagtcggtttatggcaggttggctaaatcatcgaaagaggggaagtttccgaatgttgaaagacggaatgacctatatgcatgaacatacaacgatagacctttccaaagtaaaaaacaatgaggattgtaagttggatgtatttcctgaaaccgtcagagaatttaaaagtttatacgaaaagggcgtacggaatattgttgatgttacgaatattggaatggggagaaatattacatacgtccaaaaagttgcaaaagaaacaggcattaatattgtcttttcaactggtttctatcaagattctttttacccgatccatgtgtttcgtgaatcgaaagaaaagctggcagaaagaatgattatggagattgttgaaggaattagaggaacagatgccaatgccgaggtcatcggtgaaattggaacaagttacaataaatggacggaaaccgaacaaaaagtttttgaagcggttgttgtggcacataagcaaacaaaaaaaccaatatcaacccatacttccataggaacattaggacatgaacaagtagaattttttaaaaaacatgaagttgatttaaaccgagtggtgatagggcatgttgatttatctggggatgccgattatatattgaaaatgctgagagaaggtgtatatgtagaattcgatacaataggtaaagaaaattatatgcctgatcgtgttcgggccgaaatattgaaaaaaatacaggataaagggtatatagacaaggttctgttgtccatggatatcacaagaaaatcacatcttgtatataaaggcggggtgggctattcatatttgatagacacgtttatccctctcttgcaaacctatggaataactggtgaatcaattgataagatgttgattaaaaatcctcgcgcttttatgaaaggggagagtgaatgagcatggatacttatcctctagatagcctatcaattgaagaagccatgcatagacaatttaaattggttgatgtcatgacaagacattttcgaggagaagaattgctttcacttggcgatttaggcgttgtaaaaggaatcaataaaccgcggttcacaaaaaaaatagaagagacactagctgatttctttggcacagagaaagcaatgttagttcgtggtgcaggaacaggggcattgaggtttggttttatgagctttttaaagccgggtgacgagatccttgtccatgatgcaccgatatatccaacaagtaaaacaacgttagagtcgatggggatcttgccaatatacgcggattttcacgattctgaacaaataaaagaagccatcctcaaacacccgaagttaaaaggtgtattgattcagcatacgaggcaaaaaatagatgaccattatgatttggctgaaacgataaaaaaaatacgttccatttattctgatctagttattattacggatgacaactatgctgcgatgaaagcagaaaagattggagcgcaactcaaagccgatttgtccaccttttcattgttcaagctattaggtccggaaggtattggagtcattttaggaagaaaaaatttaatagaaaaaatagaaaaaataaactattcaggcggaagccaagttcaaggttatgaagctttagaagctttaaggggtctgatatatgctccggttatgctggcaatacaagcaagtgtcaatgatcagttagttcactcgcttaataatggagccattaagggtgttaaaaaggcttatttggcaaatgcacaatcaaaagtcttacttgtagagtttgttaaaccaattgcagaaaaagtgcttcatcatgctaatgaattgggagcagcaccccatccgataggtgctgaatcaaaatacgagtttgcaccaatgttttatagagtgtctggcacttttttatctgcggatccatcactggcaaaaaaaatgatccgcattaatccattaagaagcggtcctgagaccattttaagaattctaaacacatccgttcatcgagcaacagaagatctcagcgtaaattcttcaaaaggcgatgatataaatgaataaaagagtcattatcataatattagacagcttaggtgtcggttatatggaagatgcaagcgattatcatccttcagatgttggcgccaatactttctatcacatacttgatacggtgccctctttaaacattccgaatctcgaaaaattgggtattaataaaatattgcaccatcctaaattgaaaaaaacagatcatattgccagctatggtgttttaaacctgatgcatcaaggagcggacagttttgaaggacataatgaaatcatgggaacaaagcctaaaaagacatatttagctccttttgcggaacatctcaatcatgttaaactcgctttggaagatcaaggttataaagttaacataccgaattcagatttgccgtatctattggtaaacgatttagtggtcgtggctgataatatcgaaacagattacgggcaaatttataatgtaagcgctccgctggattatattccgtttgatgaagtattgaaaataggaagatgcgtccgtcatcatgttaaagtaaatcgcgtgattgttcttggaggagaaaacgtaacacctgaacacttgcagagatcggttgaaagaagagaagacggattaataggggtgaattcgcctaaatctaacgtatacaagcaaggatatcaagttcgtcacttaggatttggtatctctcccgaaaatcagttgccgacattggcgagaaataggggaatggaagtctctcttatcggaaaaatgcaggacatcatttattgtgaaggtgcaaatagatttccaggtgtagatacagaacaagtcatgaaggatattattcaggagatggaccgcgtcaaaaaaggcttgattgctgccacagtacaagaaaccgatttggccggacatgcacagaatcccgtccgttatgcgaatcggattgaaatggtagatcgatatttgccggaaattctccggaaaatgacagatcaggatctgctgatgattagtgcagatcacgggaatgatcccacgatcggccacaaccaacacacacgggaaaaaacatatttgctggcttatcacaaaaaattatcgcctgttcacatcggggaaagaaaaacgctatccgacattgctgcaacttctgctgattatctagggcttcgcaatactgaaaacggcagttcattccttcatttaatgcaaaaaggaaaagaggagacatactgatgtttttggaatctacattaaaatataacaaaaaattaatagaggctgcattgagttttcatcagcagggaatcatttcacctaacacttatgtattagacttggacaccgtcaaaaaaaatgcaaaagtgttaagtgaaaaagccagaaaacaggatattgaactgttttttatgacaaagcaatttggtcgtaatccgttggtggcacaagctatagccgaaagcggaatcggcaaagcggttgctgtagacccgtgggaagcaatcacactcagccaaaatggaatcaaaattgggcatgtcggacatcttgttcaaatacctattcatatgatacccgcaatattggagcttcatcctgattatgttacggttttcagccttgaaaatgctcaaaacattaatagagtcgctaagaaaatgggaagaaaacaaaaagtttttttgcgtatcgcaaacaaagaggattatatatataaaggtcaagagggagggttcacttttgagcaaatcgttaaggatatcgaatcgattgaacaattagaaggacttgaaattgcaggtttaacaagctttccttgcatattgatccaagacggccttccagcagttactccgaatgtagcatccatgcaaaccgtaaaatcgtttttaatggaaagagggtataaaaagcttgagatgaatatgccaagtgcaacatcttgtgcaacaatgaaattgttaaaggaaaatggtgcaactcaaggcgaacccggccatgctttaattggaacgacacccatacatgcaacgaaacaacttgcagaaaggcctgcgatggtatatgtaaccgaagtgtcccacatatctaatcatcatgcttatgttttcggcggcggtttctatccgcgttcacatatgaaagcggcgctcgttggaacaaacaaagatcatcttaagaaggttcaagctattgaaatgacgcctgatcatattgattattacggttcattaaacacagttgaagcaaaagtcggcgatacggcaatatttgcttttcgtacacaagtctttgtcacgaatgcacatatagccatcttaaaaaacgttgctgaagatcctgaacttatcggtgtatatgattctaaaggaaatgtaatcgagtgaatgatcgttatcggcagaagtgcctgaataatggattgtcttactgaaaaaggtgtggcgaaaatgcttggcctttttgcagtgcagtttaatacagtagtcagtcttggacattttattttgtggaaaggagaaaaacgtgaaaattattcatgtatcaggttatgaagaaatgagtggaaaatcggctgatctaatggctgagctcattcaaaattcaaataatcctgttatcggctttgcaacaggttcgacaccgattggtttatataaatgcctgataaaaaagtatcggcaaaaggaaatttcatttaggaatgttactgcttttaatttagacgagtacgttggattggctaaagaaaataaaaacagctaccattattatatgaatgaaaaattattcaaacatctggatattagtcgaaggaatatcaatatccccaatgggatggcggaagatttggaacaagaatgcctcagctacgacagacttgtttctgaaaaagcaattgacatacaaatattaggaatgggattgaatggtcatatcggttttaatgaaccggggacaagctttaaaagcagaacccatatcgttgatttggatcaatcaacccggcaggcaaattcccggttctttcgttccttggacgaagtaccgacaaaggcattaacaatgggcattgaaacaataatggaaagtaagcggatccttctgctcgtgtctggaaatgaaaaatctgaagccttggcacggctgctgaacagcacccgtgtctcccaagagttccctgcttcaattttaaggaaacataaagatgtgacggtgatggcagatgacgcagccttaaataaaattcattaaattgaatgactgacaaaatcggttaattacattgaaaatttacacaaggcattgctttgaggtatcttctagccatcaatcagccaaaaaacgactgaatatagcaaatttccatcttgttgataaggacttacatatacaggttttgattgtcctcatattgtttactcgaacagttgaaaaggagagaagagtggataatcaattctaggcgagaggaagccatcatcctcaagaaccgaccgttcatattgatgattcataaaagaaaaagcagcctttttttcggctgcttcttttgaatcaagcttgcgtttacagcgtatcacatttaactccgacaacgccgtcgatcgctttgatatcgtaatagacatcggtgacataccttttcttatgaaccatgattttcgtttccatgatcggaaattcattatcgcgcatatcatcgatccggacggaatgaatccggatttttttcgctttcatttcctttaagatatccgtcagtttatccttgtcattcagggacatgcggacgcggatttctttttcctgcaagcggttgggcccgattttgccgacgatccacggcaaaaactcgacgctgattaaaatgaaaatcagactgacaaacgcttctttataaaagcccgctccgatggcgacgccgaggccggccgctccccagatcatcgctgaagtggtcaggccggaaatgacgtcgttgcttttgcgtaaaatcacgcccgctccgatgaagccgatccccgatatgatttgtgcgggaagccgcaaagggtccatcatgattctgttcgaccttggaaaatggtatgccgcatcaatgctgatcattgtcagaacacaggaactgatcgcaatcacgatgcacgtttttaagccgagcggcttgtttttcagctccctttcgagaccgatgaccattccgattaatgttgcgattccaagctttaacagcgtttcagtttcaatatgccaatccatgcccatgatctcctttccgacaatatcttatatgattgatatgattttctcacagacgccctggatggacaactgtttttgaagtgccgggggatgtcctggaaccattcatctgcaagaagcctatactcctatcattatattgccggcgtggcatcaaaagaattccgtctgagcaaaaaagccgccggatatcgcccggcggctttcgtaacctgatcatttaagaatgttcttcctcatgcgtctgttccatttcttcaaacatatctcttgcctcttttgccggtttgttcgtgatcatgctgacagcgtaaacgacaatcaagctcaggaagaaaccagggatcatttcatagatacccgtcttctcctgcaggccggtcagaatccaaatcagcacggtcacggcccctgtaatcatcccggccaatgcgccccactggttcatccgcttccagtacaagctgagaaggatggcgggtccgaatgcagaaccaaacccggcccacgcatagccgaccagatcaaggatcgtgttattcggtgtcagagacagaaggatcgcgatgacggcgacaagcagaacgctcagacgtccgacaagaacgagttccttatccgaagctttgcgccggaaaaacgtccggtaaaaatcttccgtcatggcgcttgatgtaacaagcagctgggaagacaccgtactcataatcgccgcgagcaaagcggaaagcaaaaatccggtgatgagcggatggaataatacctttgaaaacacgataaaaatcgtttccggatctttaagcgctgtacccgtctcatggacatacgccacaccggtcagtccgacgagcagagcgccgattacggagatgatcatccagcccatcgcgatgcggcgcgcaggcttcagttcttttacggatgaaatcgccataaagcggacgataatatgcggctgaccgaaatagcccagtccccaggcgagaaatgaaataatgctaatgacggtcgttcctttgaagaaatcgagcaagcttggattgatttcttcgatcacattgaaagtcggcgtaattccgcctaattgagtaaaggcaacgatcggcacgagcactaaagcgataaacataatcaaaccttgcacgaagtctgtcagactgacggccaaaaatcctccgaacagcgtataggcaattacgactgcggccgttaagaaaagaccgattttataatcgaggccaaacgccgtttcaaacagtcttcctccggacaccatacccgccgacgtgtacaatgtgaaaaacaccatgatgacgatggctgatgccaggcgcaagattcttgttgtatcattaaaccgattttcgaaaaagtccggaattgtaatcgcatcgtttgctacttctgtatatgtgcgcagccggggagcgaccaccaaatagttcacataagctccgattgttaaaccgacggcaagccaggcgcttgaaagtcctgtcacatacatggctccgggcagtcccatcagcatccagccgctcatgtcagacgcgccggccgataaagccgtaacagcaggcccaagacctctgccgccaagcatgtagtcattcaaattggatgtctttctataggagtaccagccgattaagagcatcgcggcaaaataaatccccaacgaaataaatacttcaacactcacgtttcatatctctcctctttaaaaataatgtggcatcacctctttaaaattttcaacaatactgatttgcgggtacgaagaaaattgcagggcctcctctataaaagatcaagtattggaattaaggcgctgcctagatcgtacttagttacctaacctatcaaactattcccaatcaatcaaccgtgaaaaacatccgattttattgaaaaagggcgtgatggttttgatgagcatcatgatgaaagcgtttacaaatgatatacaaagtaaaaatattctgaatattagtacgtgccgttttactgaatttttcatgtacaatgaaataaaaggcgccaaatggggcgaagatcgcggttttgttgatttagaaggctaaaatttgatatgatcagtattatatgactaagcgagaataaccttggaggtgtttttagtatgtcgcgtatttctatagaagaagtaaagcatgtcgcccatcttgccagactggcgattacggacgaggaagcggcgatgtttaccgaacagcttgacagcattatttcatttgcagaagagctgaacgaagtcgatacagagaatgttaaaccaacaacgcacgtattgcaaatgaagaatatcatgagggaagatgtacctgataaagggcttccggttgaagacgtcgtcaaaaatgcgcctgatcataaagacggctacatccgcgtgccgtcaatcttggactaataaaggagggagcgagaaaacatgtcactgtttgaccataaaatatctgaattaaaacgtctcatacataataaagagatcagcatatcagatttagtcgatgaatcttacaaacggattcacgaagttgacggaaaggtacaagcctttttgcagcttgatgaagaaaaagcccgcgcatatgccaaagaattggacgaagcgcttgatacccgggatgagcacggtcttcttttcgggatgccgatcggcattaaggacaatatcgtaacaaaagatctgcggacaacgtgcgcaagcaaaattctcgagaattttgatccgatctatgatgcaaccgttgttgagcgtcttcatgaagctgaagcggttaccatcggaaagctgaatatggatgaattcgcgatgggctcttccacagagaactcaggctttaaaaagacaaaaaacccgtggaacctcgaaactgttcctggcggatcaagcggaggctcagcggctgcggttgcggccggggaagtgccgttttcacttggatctgacacgggcggatcgattcgccagccggcatctttctgcggcgtcgtcggcttaaagcctacatacggacgcgtttccagatacggccttgtcgcatttgcatcttcattggatcaaatcggcccgatcacaagatctgtcgaagacaacgcctaccttctgcaggcgatttcaggcgttgacaaaatggattcaacgagcgccaatgtggacgtgcctgactacctgtctgcgctgacaggcgatattaaaggcttaaaaatcgccgttccgaaagaatatctcggcgaaggggtaagcgaagaagcgaagcagtccgtgcttgaagcgctgaaagtgctcgaaagccttggcgcgacatgggaagaggtatcgcttccgcacagcaaatacgcgctggcgacttactacctgctttcttcatctgaagcgtcggcaaacttggcgcgcttcgacggcatccgctacggctaccgcacggacaatgccgacaacctgatcgacctgtacaaacagacgcgttccgaaggattcggaaacgaagtcaaacgccgcatcatgctcggtacgtttgctctgagctccggctattacgacgcatactataaaaaagcgcagaaagtcagaacgctgatcaaaaaggactttgaagacgtatttgcaaactatgacgtcatcatcggaccgacaacgccgacgccggcatttaaaatcggcgaaaaaacgagcgatccgctgaccatgtacgccaacgacatcctgacgattcctgtcaaccttgcgggcgttccgggaatcagcgtaccgtgcggatttgcgaacggcttgccgctcggcctgcaaatcatcggcaaacactttgacgaaagcacagtataccgcgtcgcccacgcattcgaacaggcgacagaccaccataaagcaaaacctgaactgtaaggggtgaaaaaacatgaactttgaaacggtaatcggacttgaagtccacgtggagctcaaaacaaaatcgaaaattttctccagttctccaacgccattcggcgcggcggccaacacgcagacaagcgttatcgacttaggctatccaggtgtactgcctgtgttgaacaaagaagccgtcaatttcgcgatgaaagccgcaatggcgctcaactgcgaaattgcgacagaaacgaaattcgaccggaaaaactatttctaccccgacaacccgaaagcttatcaaatttcacaatttgataaaccgatcggcgaaaacggctggatcgaaatcgaagtcggcggaaaaacgaagcgcatcggcattacccgccttcatttggaagaggatgcgggaaaactgacgcatacaggcgacggctactcccttgtcgactataaccgccagggaacaccgctcgttgaaatcgtctccgagcccgatatcagaacgcctgaagaagcttacgcctaccttgaaaaactgaaatcaatcattcagtatacaggcgtgtccgattgtaagatggaagaggggtcgctccgctgcgacgccaacatctcgctccgtccgatcggacaagaggagttcggtacaaagacagagctgaaaaacctgaactcattcgcctttgttcaaaaaggccttgagcacgaagaaaaacgccaggcgcaggttcttttgtcaggcggtgtcattcagcaggagacgcgccgctatgatgaagcgtccaaaacgacgattttgatgagggtcaaagagggatctgacgactaccgctacttccctgagcctgatcttgtcgagctttacatagacgacgagtggaagcaacgcgtgaaagacagcattcctgagcttccggacgagcgccgcaagcgctacatcgaagagcttggcctccctgcctatgacgcgaaagtgctgactttgacaaaagaaatgtccgacttcttcgaagcggccgttgaaaaaggcgcagacgcgaagctggcgtcgaactggctgatgggtgaagtatcggcttacttgaacgcccagcaaaaagagcttgcggatgtcgaactcacacctgaaggccttgccggattggtcaagctgatcgaaaaaggaacgatttcatcgaaaatcgcgaaaaaggtcttcaaagaattgattgaaaaaggcggagacgcagaaaaaatcgtcaaagaaaaaggccttgtgcaaatctctgacgaagcgacgctcagaaagcttgtcacagaagcgctcgacaacaatccgcaatcaatcgaagactttaaaaacggaaaagaccgcgcgatcggcttccttgtcggccaaatcatgaaagcctcaaaaggacaagcgaacccgccgatggtcaacaagcttcttcttgaagaaatcaataaacgataaaaaacagactatgcctaattaaatggaggtcctcatgttgagggaccttttttatttgtatgaaaatacaaatgaaaaaacttcttctgttcaataatattaaaatttatttgaattttatttaataatatattatcatttatttgaattttgtttttaaatttgttaataagaggggctgtctatggaaagaaaggatgtacccgagtggatcttagctttagaagaagaagatgtagaatttattaaaaactttatgctgaaatctggatctttaaaagaaattgcaaagagttatcaagtatcttatccaacagtcagggttagattggatcgattaattcaaaaaattcaactaattgacgagttagaaaatgagacttttgttaactttataaaacagttagctatcgatgatcagattagtctggaaaatgcaaagctaatcattgagaaatacaaaaaagagcggggtgttcataaatgaatcctatttatatactactcattggctttacaatactagggattcaatattttttatcgaccagaaatcataccttttggggagctatactgcctacagcttatatcgtttttctcgtggcattatccatttatgaaggaaaatctttcgcatcattctttcttcctcttatcggcggattggctttattgttgggagaatggattaaaggcagagaagctttgaaaaaaaagcgggaaagagaaatgagaataatgaaagccatggatattaaataacaggatcagcctcaaaaggacagaacaagctgtttcaaaaaaaccttggagaatgactctccaaggttttttcattattccacgacaggcgtcaaagaatcgccgtcccatatctctcctttattcagcgtccatggatgaagatagagggtgtccgctcccttattcacagccgggctccactcatcgttccacgccaggaagtacgtcgttttcgggtatttttctttgatggcatggataaaccgcgcgtaatccagcccgccgtttgtcgtctgcggtccgacttctgtaaaggcaaacggcttgttcagcgatgtgagctcttcgtagccatcaatggcgtacgggtcatcaaaataagcgtcaagcccgacaatgtccacatatgatgcgcccggataaaagtccgttttaaagtctctgttggcgtccggcgcatacacccacaagagatgatccaggcctcttgtttttgtcatatagtcatagattttcacatagagctgtttgtacaaggagattctttcgctgtctttttgattatattgcgtcagcccccaccagaaccattcgccgttcatttcgtgaaggggtctgaatagaacgggcacgccttcattttcaagctcctggaggccgtccgcgattttgctcagcatcgcctcaagccgctttccttcaggagtggaagaatctaaaattctctcatactggctgtttgaaatctgagttttataatgacccgaagtaaacgcggtgtttgcgaggtgcatgctgatttgcggaatgcctccgcttttccagtatgcgatcaaatcacggttgcagctgtagtcaatcgtatcggcgatcttttccggctccagccatcctcttgcataatcgcagccgtatatggccggcagctgtcctgttgcctgtttgatccggtcggcttcagccgttgaaaatgtgtcgaggctgtatcctccgaacgccccggacatcacccggctttccgtccgattgggcaggtgggcgagccagttcatcaccgctttcgtcgtcggctgggcattcgggttcaccggagaaacggtgtgtgcatagctcggctgcgaaacggcaaaagcaaggagcagcgcgaagattgaacaaacgatgttttttttcactaaggtaaaaccccctgaaacatatagattgtcttaagcgatcttattatacatgctgcttccaaaaaatacatggtcagatcgtcttattgtaagggaataaaaaaacagccataaggctgctttatgaatgaaggaaacgggtgatcattccatatagatgctgaacattgtcctgatgctgcaagtttgtcagcatgccttggagcacgggtgcgcggggcgaatcctttctcagctcttcctcgatcacatccagtgtaatgagaatgtcttccgaaagctccggctgacgtttggcatcttcaagctcccgcaaaatcgtatgtttatcggccgtattgccggcgttccggtaatagctgtacgtccggccggccaagatcggctgctccccgttttgaaccatgccatcaatcatgtcatcgattcttctcataataaaatccgcaagttcgtaaaaatcgatatccagttcattaaagataaacaaattttgataagactgcacgatgccttgaacgatcacggacaagtctgacagataaggcttcacaatgtcaccgtaggcggctgacagcgcgttttgatacgtctcgtggaatttttggctgacatttttaaaatattcttcgatcttgctgttttccggtatgctgtgttcgctgatcatcacgagaataaaatcgcggtgctccttgctctcgctgaattgataagcaatctgctccttgaacgtttccttaggagggaaattcttctgctgaatgatcttcatattttccatcattcgatcgatataatacttaatgattgcgagcaaaagagcttctttcgacttgaaatgcaggtagaaagccccttttgagatgttgcattcattggcgatgtcttgaatcgttgtggaagcaaaaccgtttttcgcgaacaggtgcaggcctgctttaatgattttttcttctttttctgtcatgaatgtacccctttaacacttctttaaaattgaataaattttaacatatataagttgacgctgtttacttttgaagtttattattgtatagaatgaccagtcagtcaatctgtattctgaaaatgatacacaatggaggtcgtaatgaattctatcattaattttgtactaaagaacaagttcgctgtgtggctgatgacgattattgttacggttgccggcatttatgcgggtttaaatatgaagcaggaatcgattcctgatgtgaacatgccttatttgaccatcagcacgacatatcccggagccactccgagccaggtagctgatgaagtcacaaagccggttgaacaagccgtgcaaaatctggacggcgtcagcgttgtgacgtccacatcgtatgaaaacgcatcatcggtgatgattgaatacgattatgaaaaggatatggacaaagcgaagacggaagccgctgaagcattggcgaatctcgatctgccggacaatgcgaaagagccgagcatttcgcgctacagcatgaattccttcccgattctcgcgctcagcgtgtccagtgataaagacgatcttcaaagcttgacgaaaaaagtggaagacagcctcctgacgaagcttgaaggccttgaaggcgtagcttccgttcagctttccggtcagcaggttgaagaagtcgaattttcatttaaaaaagacaaattgaagcaatacgggcttgacgaggatacagtcaagcaagtgattcaaggatctgatgtgacgactccgcttgggttgtacacattcggcaaagaagaaaaatcggtcgtcgtcagcggcgatatcgacacaattaaagacttgaaaaatatgagaattccagcggcgtctgccggaggcgcaagcgcgcaagccggagcgcaaagtgcgcaggcggcccagggggcgcaggctcaagccggggcacagagcgccggacaagctcagcaaagcgcgggagtcccgacggttaagctgtctgacatcgcaacgattaaagatgtcaaaaaagccgaatccatttcacgaaccaatggcaaagacagcatcggcatcagcgtcattaaagcaaacgacgccaataccgtcgaggtagccgacaacgtaaaagctgaactcgaacaattcaaaaaagaccacaaaggcttcaaatacagctcgacatacgatcaggccgaaccgatcaccgagtcggtcgagacgatgctgagcaaagcgattttcggagcgatctttgcggttgtgatcattctcttattcctaagggatattaaatcaacattaatctcggtcatttcgattccattgtcattgttaatcgcactgctcgtcctgaaccagcttgatatcacgctgaatatcatgacgctcggcgccatgacagtcgccatcggacgggttgtcgacgactcgatcgtcgtcatcgaaaacatttaccgccgcatgaggctgaaagatgagccgctgcgcggaaaagcgctcgtgcgcgaagcgacgaaggaaatgttcatgccgatcatgtcatcaacgatcgtgacaatcgcggtattcctgccgctcgcacttgtcggcggtcaaatcggcgaattgttcatgccgtttgctttaacgattgtattcgcgctcgctgcatccctcttgatcgcgatcacgctcgtgccgatgcttgcgcacaccctcttcaaaaaatcattgacaggcgcgccggtaaaggcgaaagaacacaagcctggggtactggccaacttctacaaaaaagtgttgaattggtcgctcagccataaatggatcacatcgatcatcgcggttctgatgctggtcggaagcttgttcctcgtgccgctgatcggagcgagctacttgcctgccacaaaagaaaaaatggtgcagatcacgtacacccctgaaccgggagaaacgaaaaaagaagcggaaaaggaagcgcaaaaagctgaagaaatcctattggaccgcaaacacgtcgatacggttcagtatacgttaggagcgggaaatccgctgatgggcggaagttcaaacggcgcgttgttctatatcaaatatgaggaagacacgcctgattttgatcaagaaaaggacagcgtcttaaaagacattcagaagcaatccaaacgcggagaatggaaaactcaggatttcagctcctcaggcaacaacaatgagttaacgtattatgtgtacggggattctgaaaaagagattaaaggcactgtaaaagagatcgaaaagataatgaaagaccaaaaagacctgaaaaacgtaagctcaggcctgtccagcacatatgacgaatatacatttgtcgctgaccaggagaaattaagcaaactcgggttaacggcatcacagatttctcaggcgctcatgaaagaaacatcgcaggcgccgcttacaaccgtgaaaaaagacgggaaagatcttgatgttacgattaaaacagaagaagaaacatataaaagcgtcaaagatttagaagacaaaaaaatcacaactccgaccggccaggaagtgaaaatcggcgatgtcgcgaaagtgaaggaaggcacgacatccgacacaatttcgaaacgggacggcaaaatctatgccgatgtcacggcggaagtcacatcagacaacgtcacggcagtatcagtcgacgtacagaaaaacatcgacaagatcgacctgcctgacaatgtcacaatcgataccggcggcgtatccgctgatatcgaagattcctttacaaaactcggactcgcaatgcttgcggcggttgcgatcgtctacctcgtgcttgtgattacattcggcggagcactggcgccatttgcgatcctgttctcgctgccgtttaccgtcatcggcgccttggtgggactttacgtatcaggagaaacaatcagcttgaacgcaatgatcggaatgctgatgctgatcggtatcgtcgtcacaaacgcgattgtcctaatcgaccgcgtcatccataaggaagcggaagggctctcaacgagagaagcactcctggaagccggctctacaaggctccgtccgatcctgatgacggccatcgccacaatcggcgccctgattccattggcgctcggatttgaaggcggcagccaggtcatttcaaaagggctcggcgtcaccgttatcggcggtctgatcagttcaacgctcctcacccttctgatcgtaccgatcgtatacgaagtactggcgaaattccgccggaaaaaaccgggtatggaagaagagtaagatggtataacttcaaccccttggaatggacacaggaaatggtccattctaaggggttttttctttgaagagacgatcgtcggtgtttaacaaaatatcctgtgttatgctttgttagaaaaggcaacttgatgaggaggcattgaatggaatcgaaaggaaacagcgaaccaagccccaaaatcgtaaagcggctcacctggatcataccgatcgtgttgataggagtcatttttctcttaaaaaatatgagaaatcctgtgactgatgttttattttatattgtatgtgcaggtgtcatcatcttagtgattttccgcatcataaaagagacaaaaagcagatgaagcaagttttgaacttgtcgataaaggttgaagtgatcttcatcgacaagcttttttaatgctgcgttctccagccggcgaagaagcggctaatcatgcggattgatcacagccagcagctgatgatcttcccattttccgttgatcttgacgtttttccgggcgatgccttctttgtgaaaacccgccttctccagcacccggatcgaggcaatattacggggcatgacgccggcttcgatgcgatggagcttgagatcgtgaaaggcgaactcgaccatcagcttgacggcttcggtcgtgtagcctttgccgttgtgcttctgatccaaaaaatagccgatgaaggcgctttgcaaggaaccgcgcagcacttggaaaaggttgatcgttccgatcagcgcatcgtttgccggatcaaagatgccaaaataataatcttcatcgttctccatattttcatataatctttgaagcctcttcttttgtccttcgattgtataaaactcctcgttccgctccattgaaaactgttcaaagaacgggcggtttgcgttctgcaattcgaggcatgcctcggcgtcttcagccgtgagcggcctgatgtaaatgtttgtcccttttttaatcatggaaagtctccttttataaagatggaatgcggtcggctcttttcatcaactcttcaaaatacgcaaaaaattgatccctgtcgacttgatcaacgactttgaccattctgccgtcaggatgctcttctgtcgttccttggcgcgggctttgtgtatggacaaccgccttgatgctgcgcgagcgtgtcatatcgactgtgccgagcgtcagcgtcgtcagcacatcccaaaggtagtatgtcgaattcgtttcgttatggacaagcggcggacacatcgcatagcattggccgataaagtcgatcccgatatgctttctgaggctcgcccaatgtgagcggatttcgtttgtcaaaggcacctggttcgtgctttcaagcgcgaccatttcgatctgaatgtcgctctcgaataccgtcttcacgctgtaaggatcccaaaaagcgttccattccgccgtcccgtcgtgctcaggctcttctacatttcctttctcaaggaaggtgccacccatccagacaagttttgcaatgtgctttatgatcgccggctcttcctcaagcgccctcgccaagtctgtcagcgggccggtgaacagcagtgtcaccggttccgggctctgcctcacgcattcaattagatgaaggtgagcgggcgggtctgacaccggagtccggacttcgcctttttcatttaaaatcggcagagcgtcgacataaaaggcgtgcatgcgccactccttcgggaacgggtgcacccctctcgaatcggatgccgcagtctcgacctggtacgaaccgaagcggtcaatgatttttcgactggcactgagagcaggctccaaatagcaatccgccggtatgacggatgttccgatcaatttgacattttccatctgcaatagcagaaataaagagacgagatcatcgacgcctccgtcatggttaaaataaacgggctttttcacagcaacatctccttttttcttaatattaattattttacatcaattagatcctgaagtcttttttaccattaattatgatattttatctaaaattaaacaaatgatgatacccattttgttgcgattttttcaacaactagtataattaaaggttgttggtaaagaaatgatacggatactctaataggatgatgaaaacatgaaacgtgcacgaatcatatacaatccgacttccggacgagaaatcttcaaaaaaaaccttgcccaagttctgcagaagttcgagcaggcaggctatgaaacgtcatgccatgcgacaacaggggaaggggatgccgtacaggccgccagacacgccgctgagcgggaatttgacttaattgttgcggccggaggagacggcacattaaatgaagtcatcaacggactggcgccgttggaacaccgccccaagctcggagtcattccggtcggaacgacgaatgactttgcgagagcgctcggcattccgcgcgaggatattttaaaggcggttgacacaatactagagggagaagcccgtccgattgacatcggccgcgtcaacggccaatatttcatcaatatcgccggcggcggacgccttacagaactgacatatgacgtaccaagcaaattgaagacgatgctcggccatcttgcctattatttgaaaggaatggaaatgctccttccttcactgcggccgaccgaggtcgaaatcgaatatgacggcaagctgtttgaaggagaagtaatgctgtttctcgtcatgctgacgaactcagtcggcggctttgagaagctcgcccccgactcaagcttgaatgacggcatgtttgacctcgtcattttaaaacggacaaacctcgccgaattcatcagacttgtcggacttgccctccgcggcgaacatatcaatgacgagcatgtcatctacacgaaagcaaaccgcgtcaaagtgacggtcaaagacaaaatgctcctgaaccttgacggcgaatacggcggcgaactgccgggcgaattcgagaacctctaccgccatatcgacgtcgtcatgtcaaaagaaaaagcgagaaaattggatgaatgaacttggtctaaagagctggccaagtttttcttatagcaggtgaaaaagatgaaacaaaaagcccccgttcaaaaaaatgaatattacaatgtcgtatttgaagatttaacacacgaaggagccggcgtcgccaaagtcgacggcttcccgattttcgtgccgaacgcgctgcctgacgaaaaggcgcagatcaaagtgacccgggtcaaaaaaggcttcgccttcggccgcctcatcgacttgaaagaggaaagccgctaccgaacggacgcgccgtgcccgatctacaagcagtgcggcggctgccagcttcagcacatcaactacgaaggccagcttctttacaagcagaagcaagtcaaagacgtgcttgagcgaatcggcaagcttgatttaagccggatcaccgtccacccgaccctcggcatggaagacccgtggaactaccgaaacaaagcgcaggtccctgtcggcgaaagagaaggcggtctgatcgcaggcttctaccagcagcgcagccatgaaatcatcgacatgaacgaatgcctgatccagcaatcggaaaacgaccgcgtcgttcaagcgattaaagagatctgtggcaaatacggcatcaaagcgtacaacgaagaacgccacaaaggctggctcagacacatcatggtcagatacggcgccgcgacaggcgaaatgatggtcgtcttcatcacaaggacaaacgacttcccgcacaaagcgaaaatcgtcgaggagatcaccgcggcattcccgcacgtcaaatcgatcgtccaaaacatcaatccgaaaaaaacaaacgtcatcttcggcgacgaaacaacggtcatctggggagaagaatacatttacgacacaatcggcggcatcaaattcgccatctctgccagatcgttctaccaagtcaaccctgagcaaacaaaagtgctctacgacaaagcgcttgaatacgccgaactaaacggcgaagagaccgtcattgacgcgtactgcggcattggcacgatttcgctgtttctggcgaagcaggcgaagaaagtgtacggcgttgagattgtgccggaagcgattgaggatgcgaagcggaatgctgagttgaatggcattgagaacgctgagtttgaagttggcgaagcggaaacggtcattccgaagtggtatgaggaaggcattgcggctgacacgctagtggttgacccgccgcgcaaaggctgcgacgaggccttgctgcggacgattttggagatgaagccgaaacgtgtagtgtatgtgtcttgcaacccgggaaccctggcgcgcgatttgcgggtgctggaggatggcgggtatgcgacgcttgaggtgcagcctgttgatatgtttccgcatacgagccacgttgagtgtgttgtcttgatgtcaagggttgagaaatagttctactaaaaatactgataaataaagggtttcctgacattgcatttttcgctcaattatttttacgaagatgctgatgctagggaacccttaattttattgttcgcaggaaaatatcaactgcctgaaagcgatagggttgagttgacagattagatttttcgctggggttgaggagacagtgtagataacattgtgggttgaagagataaattaatatatatgtacactttcataatggtatttaaattattctaaatattcaaaataaaattaccgttttatggttaaaaagtctgttgtactgaacagacaggttaaaaataatagcgtatatatgaaaataaggctctctaaaaaattctcaaatatgcgtaaagttttgattgtaaatatactaaatgtgtgatacagactagcaaaacaccctcgcaatgattctgctttatatacgaaacgtgaggtggagtgcttctttcattctgaattgttcaatgtccttacctctctaaaccctgacatgttaatccaacagctacaagaggaggtggtgcgatgatgacagctaaggaattcttaaaacaggcctatcgtctgaatgaattgattaattccgaccttgaagagttacaaaacttaagggaactatcaagaagtgtttcatcccccgttcttgaggaaaaagtcgaaccaagtgtactgacccaccctttgaaaagtatgtgattagaatagtagatttggagcaacagatacaacaagaggttgaacggctagtaaagcttaaatcagatatccgtgaagcaattaaccagatggaaaacgtagatgagaagctgattcttcgctaccgatacattaactttggaaaggttctggtcattgccccacttcgggtagctagggatacttggccagctgagataaataagtgggagcatttaaaaggactcaagttttcggtagcaatcggtacagagcaggagagattggcggctctaaggaaacctgcaagtgtctatcaacgtggctgtgcccatttggtacttccacagcttctagagcgatatgccatgagtgcggcaagatggatacagtgtgatagcagagtggcaaggagtacaaagagccatcagattacttctatcgtgagtccctcctcttgcaagaggaagaatgtgatggacttcatttgctggggtcagctttccttgtcgtttacattcctcacaaagaggatgagctgcaatgtagctgtcacgtatccttttccaagcacgaccataacgcttacgggttgctgggtcacggtcgtacttttcataccgtgcggcttcctttttagcatgttcattcataataaataataacatttcatcttgagttgaaaaataatgtcttaacgcaccagaagacatccctgcctcagctgcaactcttcgtatagacgctttctcaaccccttcgaatctcttttaggacatttctaacaatgtatcggatgtcgattttcccgctgcaggagatctcgcccgccacgataatttttcctttagtcgctataacctcgcaagccacccttgatgccctatctttacgtaggcaagcttccaaaatgctatctgctatgatgtcgcatagtttgtcaggatgcccggcgcatacactttctgctgttaagtatcttttactcattacatcatagtttggtggtaaaaagccgaataaggctactatcaaactgccacttctttcatagatttcactcgctactagggtttttccatccttttgcactgcggagagcatggccattggcttgtcaattcatgctttattaagacctgatgtatactctccagaaaaggtgaaggaagttattcgttatcaatgacatggtggtcattgatgagctttcatctttgattatttcggtgcaacagataattcctacacaaaggcaactattcgcaaaacgatggttgcggcggaagcccgtatttatagaccaggtacaaagtttgatagtgttctaatcttaaacggtcctcaaggtatcggtaagtcaaaataccgctgacctgaaggggcaagaaatgccaaagccctccctcttgtactatcccacagaatagtaaaaagactggatgattgtcgcaaaggaaagctgataaaagggattcttcccgatggtaaagcacaagtaacggtagaatatgaagctgacactccagtaagaataaagacgattgtgatatcggtacagcacgataagaataaaacacaggaagaacttaaggcagatatccttaacaatgtcttatggcagtgctttgaagacttcccttttgatgatgaaacagaaattctcatcaatccatcaggtcagttcgtacttggtggacccgctgccgatacgggtttgactggaagaaaaatcatggtcgatacctatggagggcttgcatctcatggaggtggtgctctttgtggtaaagacccaacaaaagttgaccgaagcggtgcttacatggctcggtatattgccaagcatatcgtttggtgtggctatgccaagaaatgtgaagtgagtatttcctatgccattggtaaggcaaacccagtagcctttactgtaaatacccttggtactggcactatttctgatgaaatattaactcttgctgcccaggaaactttcaacttaagacctgcggccatcattgaaaaactgcgtcttagaaatgtgatttactctgacaccgcggcttatggtcactttaacagttgtctgttcccgtgggaggatgtaaataaatacagtgaatttagaaaggcggtggaaaagtatgttgatagagaagattaaaacgaaacaactcatccccgctgaatataacccaaggaaagatttaaaaccgggtgattcggaatatgagaaacttaaacgctcccttgaggagtttggttatgtagaacccgttatatggaataagactacaggcagagttatcggaggtcatcagcgtttaaaagtcctgcttagtatgggtatagatgagatagaatgcgtagtagttgaaatggatgagcaaaaggagaaggcgctgaacattgcactaaataaaattagtggtgattgggttaaagacaaattagcacttctcatcacggacctaaatgcttcagactttgatgtgtctttgacaggttttgacccgggagagttggacgatcttttcaaggattcccttaaggataatataaaagaagatgattttgatgtagacagcgagctgaaaaagcccgctgtttcgcatttaggggatgtttggctacttggacagcatcgattagtctgtggagacagtacaaagaaagacacctttgatgtcttgatggatgggaaagctgccaatctggtagttacggaccctccatataacgtcaactatgaaggcactgctggaaaaatcaaaaatgacaatatggctaatgaagcgttctatgattttctgcttgcggcatttcaaaacaccgaagcagcgatggcaaaggacgcatctatttatgtatttcatgctgatacggaaggactcaattttagaagagcattctccgatgcaggattttatctttccggtacttgtatatggaaaaagcagtcccttgttctcggtcgctccccatatcagtggcagcatgaaccagtactctttggatggaaaaagaaaggcaagcatctctggtattcagaccgcaagcagacaaccatctgggagtttgagaaaccaaagaaaaacggcgaccatccaaccatgaaaccagtggcacttgtggcttatcccattatgaactcaagccttagtaactgcatcgtgctcgatcctttcggtggttcaggaagtacactgattgcctgtgagcaaacagatagaatctgctacaccattgaactggatgaaaagtactgcgatgttattgtgaaaagatatattgagcaagtgggaaactctgatggtgtatttctattaagagatcgcttgaaattcagatattgtgacctgccagaggtgaatgaggatgagtaaattgacacttggttccctctttgatggcagtggtggttttcctttgggtggtttgctttgtggcatcgaacctttatgggcatctgaaattgagccgtttcctatacgggttacgactaaacgtatccctcagatgaagcattatggagatataaacaaattaaatggtgcggagcttccgcctgtagatatcataaccttcggctctccatgcacggatatgagtgtggcgggtaaaagagctggtttggacggagagcaatccgtccttttttatgaagcaatccgaattattaaggaaatgaggtgtaagaccaatggacaatatccaaggtacgcagtctgggaaaatgtccccggtgcattctcgtcgaataaaggagaagacttcaaagcagtcctcgaaacggtcatcagtgtcaaagaaccgaatacctcggtgcctttacctgaaaaaggacgatagccatacgctgacatctatatgggagacggatggagcgtggcttaccgaactatcgatgcgcaatatttcggagtcccccaacgtcgtcgtagaatctaccttgtcgcagattttgcagacggatgtgccggagaaatactatttgagtccgaaggcttgtcaagggattttacgccgagcggcagcccgtggcaaagaactgccggaaatgctaaaaaccgctctggaaaaacaggcgatagcataacttgcctaaatgaccaaggcggaagagtgatgtctgtttcgaaggatattacagcaacacttcgagcagaggaacatggacatcagccttgcgtaatgcagtcaagcggattttgtactgaacacagtgccaagagcagaagtgtaggatatgaggaagaacgttcccctacacttagaacaggtgttgtcccaggtgcagtcatgtcctttgaaccgggtgctgcttctcgagttggtggccatactgacgaaaacttaagtggatcacttcgtgcaaacatgggagataatcaaacagctgttgtcattgaaaaccatccaactgatagccgtgtgaaactctcggaggataataaagtacagacgctgacctctcggatgggaactggtggcgggaatgtaccccttaaggattatatcaagcaggtgcacggaaacgtcattccgaatgatgaactgacatacttggcagtccatattcatcgattgatttcttatcagcaattaaaataaatgagagccacttgcctttgtggaaggcgagtggtttcttgtttttgaaaaagaaggagcgttttttgtttataggcaagatgagttgttgatcactaccaacagttgaaattgacaacaaaaggctttttcaattgttgacaaaaacagattactaattgacaaaaggtcattacaaaaatttacacgtgtgataagatcatgttaaagatagagaacaatcttaaaaagaaagagggggttcggcatgagcaaggtcgcttcagaggtggttgcgggggtgttgaacgaattccatttggccattaaaaagcacgatactgagcaggcaaagcatctttttgatgaggcgaagtcgatgttttccgagatggaagaggatcagaatgtgctggcttatttttcgcttcttgaggagcggtaccggatgatgctttatgatgcgaggggagagcggctgccgcgggagtcttattttaatgcttcgcagatcgagtgcatcgagcagacggatcatatgattgattactatttctacttttttgaggcgatgcatgaagcgtacaacaagaatgttgagcgggcgatcagtctgtacaaggttgccgagaaaaaactggcgaaggtgcccgatcagattgaagcggccgagttttattttaaagtgtcctggctgtatatgtctcttcggcaaaatgcggtttctctcaattatgcgagagacgcgatgaatatttataaaatgcatgacgggtacgaaaaaaagctggcgatttcccaagttgtgatggggacaaattacatgcagatgcagcgctttaaagatgcggagaagtactttgaagaatcgattgaaatttccaaaaagattgacgattcatttttagaagcgatgcttcatcacaatatcagcattctgtattccaattccggccggtctcaggaatgcattctcgccgtccagcatgctttgagcaacgccgaatggtgcaagtcaagctactatatcaactcgctttacatgctgaccagagagtttttcaaaatcggcgaaacagaagcggccctgttctatcataaaaaaggacaggaggaattaaagaaaaacgggaataagcattatgaaaagaaaataaatattatttatgagctgtattgccatgaaaacgtaaaaagcatcaaagacgacatccattccttggacgagatgaatgatttagacggtgtctgcgatctttctttgctcatctcaagctattttgagaaaaaaggagatgacaagaaagcgctggaatttgttaaaatattcatgaaagccgaaaacaaaatgagatcattagggagtgaggtattgtcatgaaaaaattaattctttgcttgtcgttaactgctatggtcttaggcggagctgctttatcccaaagccacaatcaggcgtcaggcggcgttcaaacagcggagctgccggttgggggttaatgttcgctgaagtccttttacagggcttcttttttaaagccatgaaacggggtgcgattaaagtgaatctgcaagagcatgaaatataaaaaccttccatattcgcgagaggccctccaatcgtttaaaacatttttagacataaaaattggagggaaatatcatgaatgacaaaacatttttatcatttttaaaacacgcagataagcctttcagcggctgggatttttctttcattgaagacacaggacgaatgaaaagcgacctgctttcatggtcatacggaagcatggctctgtctcttatccaggattccgaatcaatgttggatatggggacaggcggcggcgagtttttatccaaattggggccgtttccttcgtcagcatacgctactgaatgttatttgcctaatgtgccagtcgccaaggaacgattgacgcctttaggggttcaggtcgttcaaattgatgatgatgaagatcttccatttgaatccggccaattcgacctgatcatcaataaacacgaatcatattcagtacaagaggtgaggagaatcctttcaaaaggaggacggtttctcactcagcaagtcggcgggcttgattgcgaagaaataaatgaaaaacttggcgtgccgctaaatgaagaatttaaggattgggacttggaaacggcgttaaaagagatggaaaagcatgattttaagattttaaaaagcagagaagagtgtccgactcaaaggttttatgatattggggctctggtctattatttgaaagccattccctggcaggcgctcggttttgaagtgaatcaatataaggatgaattgtacgagattcataaaatgatcgaagaaaagggctattttgacgtcacacagtaccggtttatgattttagcggaagcagtttagagtttgatcaaagattgtgcctaagaagggtgtctcatattatatggtgacatccttttttattttcctatattttcgtaaagccagttatttatccatatatcaggaggaaaagcgatgtcatctcaaactgtaaccaattattttcttgatagtgtggctgcgactattatgcgctgattgtttacggtgcttgctttttattacattcgttcatttgaccggaatcgtgttttgattgcaggaatttttgttactgtttgtgaaaaaaaagcagaagaaaaacagcggaaaactcgcgtcttagggcggatttccaaaaaaatgtcgtaaattcgatgcatcaatttgatgaaatcgcccggccctgcggtataatagattttgtgaatgaaagattcaatgttgaaagagagtggttacatcatgggccgtaaatggaacaatataaaagagaagaaagcgtccaaggatgcgaatacgagccgaatctacgcgaagttcggccgcgaaatctatgtggcggcaaagcagggagagcccgatcccgaactgaaccagaacctgaaattcgtgcttgagcgcgccaaaacatacaatgtcccgaaagcgattattgagcgggcgatcgaaaaagcgaagggcggctctgaggaaaattacgacgagctgcgctatgaaggcttcggtccgaacggagcgatggtgatcgttgacgcgttgacaaacaacgtcaaccgcacggctgccgatgtgcgctccacatttggcaaaaacggcggaaacatgggagtgagcggatctgtcgcttacatgtttgatccgacggccgtcatcggctttgaaggcaaaacggctgatgaaacgctcgaattattgatggaagcggatatcgatgtccgtgatattttagaggaagacgatgcagtgatcgtctatgccgagcccgatcagttccacgccgtacaggaggcgctgcaaaacgccggcattactgagttcacggtggccgagctgacgatgctcgcgcaaaatgacgtcgcccttccagaggacgcgcgcgcacagtttgaaaagctgattgacgcgctggaagatctggaagacgttcagcaagtttaccataatgtcgatttaggggcgtaaaaagaggccctgaaaaaatcgggaaagaaaagatagatgaacaggaggacgacctgttttgtctatctttttttattgtaaagttaacttgacattttatttttttgttaagtatactttacgtatagtgaactttacattcccaatggaggaaagatgaaaacgttaataaaggaaaagcgcacttcgctgaacatgacacaagaagaactggctaaaaggcttaatgtgtcgaggcaaacggtgatttcccttgaaaagggaaaatataaaccttcactcgttctggcgcataaactggctcaaatttttgaatgtctgattgaagatttatttatttttgagggggatgaaaatattgactgaaacgatgacaaacatactgatcgctttagcgggcttaggaataggcgtgctcgggatcgcaattgtttacaaagtaaacagacgaattggaaaaaaagagaggctgttcgatgagcgccagcagaagattagctatcaggctaaggcgctctcctggaacattacaatggcggccattttaattgcctgggcgttggtgatcattttccaaggaatatccttttcatttttcctaataacaggtttatatatcctgcaatatttatcaatgctgatcacaaccgtttatcttgctcagaaaaactgagcggtgctgttccccttgtatccggattttaccgatttatcggtaaaatctttttttatatccaaaagacccataagattgaattttcttgaaagattgccgatacataagatgtagtctaacttttcccaaaactgtttgataggagatggactgaatgattcaaataactgacctcaaccgtcaatacataggaggggaatggagagacggccaaagtgaaagcgtgttggccgatctgaatccttttacccataaaacgattgcctcttttcggaaagcgacgcgggaggatgtcgatgcggcttacaaagctgcgcttgaggcgaaaaagaaatgggatggcgtcaatccctatgaaaaaagggtaattttagaaaaagccgcggcttatattgaagacaatagagaagcgattgtgtttctcattatggaggagcttggcggaacacggctgaaagcggcttttgaaatcgatcttgtcgtcaatatgatcaaagaagcggcgggcttcccgctcaaaatggaaggcaaaattctcccttcaccggttgatgggaaagaaaatcggatataccgcattccggcgggagtggtcggcgtcatcagtccgttcaattttccgttctttttatctgtaaaatcagttgcgcccgcgcttggcgccgggaacggcgttgttttaaagccgcatgaggaaacaccgatttgcggcggcacgctgattgcaaagatttttgaagaagccggtcttccgaagggactgctgaatgtcgtggtcacagatatcggggaaatcggcgacagcttcgttgagcatccgattccgcgaatcatctcgtttaccggttcaacgaaggtcggcagctatatcgggcagctggcgatcaaacatttcaaaaaaccgctgcttgaactcggcggaaacagcgccttgatcgttctcgaggatgccgatttggaatacgccgtcaatgccgcgactttcagccgcttcacacatcaagggcaaatctgcatgtcggccaaccggattcttgttcaaaaagaagtgtatccggaatttttaaagctgttcagccaaaaagtatccgggcttaaaacgggcgatccgctggaccctgaaaccgttatcggccctgttattaatgaacgccaagctgaacatttaagaaaatcgattgaaaaaggcatcgaagaaggcgccacaccgcttctgaaaggcgatattaaaggcaatctcgtcgagccgacgattcttgcggatgtcacgcctgatatgtctgtcgccaaggaagagctgttcggtccggttgtatgcgtcatgccgtttgagaccgaagcagacgcggttgagatcgcgaatgacacgcctttcggactgagcggagccgtacacacgggaaatgtggagagcggcgttgccatcgcaaagcaaatcgagacgggcatgatccatgtcaatgacacgacgatcaacgatgagccgcatgtcgctttcggcggtgaaaagcaatcggggatcggaaggctgaacggagagtggagccttgacgaatttacgacattaaaatggatttccgtccagcaccaaaaaaggagttttccatattaagaggaggatttgatacatgaatgaagcagtaaaaacggacatccacccgctgctggatgcttttgtgaaagtggcgccgttcctgaatcagctgattcaggacgatgtgacagtggggatttacgataccgaaaagctgatcgtcaacatcccgggaaagacattttccctgaatgtcaaagtgggtgaccctttgcaggaaggcgatattattacagacgccatccgccaaaacaaaaagaaagtaagcatggtgcctaaggagctgttcggcttccctcttgcggcgagagcgatcccgctccacgacgagaacggaagggttatcggcggagtcgggctcggcacgagccttgaaaaatcggatcagcttcaccgcgtcgcggaaagcctgtcggtcatcgtcgagcagacggcttcggccattcaggatatcgccgaatctgtcagcggcttctccggacaaatgtccgacatctccaagcaggcgaaggaagtcagtgaaagcgccggagaaatcgagaaaatttcagtcaccgtaaaaggcatttcagatcaaagcaacctgctcgggctgaacgcggcgattgaagcggcgagagccggagagtcaggaaaagggttctccgtcgtcgccgacgaaatccgcaagcttgcgacacactcaaaagaaaacgtcggccagattgaccaaatcacgaagaaaatccacgcgttattaaaagaccttgagcattcgatcgaagtcatcaatgaacatacgagcggccaggccgcaggtgttgaacaaatttccgccacgatgcaggagatcagcagcaacgcgcaaaaccttgccaagatggcggaacaccaatttgaagactagaactttcacaggcccgctggcaaaatcggcgggcttttctaatttttcatttattaaaattttattttaaattttttagaggaattttccccggtcaaagcgaaaagtgatgaatgggaaaccgctttcaagggggatgggatagatgagagtatatacaacgactaaactgaccggattgttattggggccgatcagttttttgctgattctcggcttgataccggaagctgagctggcttacgcgccgcgaatcgttcttgcggttacagcctggacggccgtctggtggattacggaagccgtgccgattccggcggcatcgctcttgccagtcattttgctgccgacattgggtggtttagatatggaaacgacggccaaagcatacggcgatccgattgtgtttatgtatatggggggatttatcattgcgatcgccatcgaaaaatggaatcttcataaacggatggctttgcacattttaaagcggatcggggctgaaagccaccggatcgtgcttggcgtgatggcggcgactgcgtttttatcgatgtggatttcgaatgctgccaccgctttgatgatgcttcccgtagcgctagcagtcattaaagaagtgcaggaaaaagaaattttaaaaggcgaatcgctgcagaagttcagcaaaagcattttgctggctgtcgcgtatgcggcgtcgatcggcggacttgccacattggtcggttccgttccgaacgcggtgtttgccgcgatgtccaagcagattctcaatcacgaaattatgttttttgaatggtttttattcgggttcccggtttccattctgtttcttgccattttatatgtttatttaacgaaaataaaatttaaagtgagcgcttttcaaggaaaaaagcctgattttatcgatcatgatttaaaggcgcttggcgcaatgacgagggaggaaaaatcggtttttaccgtttttttattaaccgcatgtttgtggatgttcaaatttatccttccgtttcaaatatcagatacgtcgatcgcgattttcggagcggttctgctgtttttaattccgagtacaaaggatgaacggattttggaatggaaggatatgcagtcgctgccatggggactgcttctattgtttggaggcggcttgtcgcttgcggccggtttttcggcgaccaatctgacagcatggatcggcggcaagctcaagctgttggaaggccacccttacttatttgtcctgattattttgacggctgcgattttatttatgactgaaatcatgtctaatacggctgtcgccaatatggtgattccgatgacgatcggccttggcgccgcgcttcaggtcgagccgtacgggctgatggcggcagctgcgcttgcttcatcgtgcgccttcatgcttccgatctccaccccgccgaatgcggccgtcttcagctccaatctgctgacgataaaggatatggtcagggcgggcttttggctcaatatcgcaggtgtcttcttgattgtgatcagcgcatatttttggcttccggccgtctttcaataatgtccgcgaaaaagctctcactagttttcttgcatcatctgcattaaaataaagttatgacattacgttaggattggtagacagatgagcatttttaaagcggaaggtttatataaaacttacggagacaaaacattatttgaccatatatcgttccatattgaagaaaacgaacggatcggcttgatcggaccgaacggaacgggaaaaagcagcttgctgaaagtgatcgccggccatgaatcgaccgaaaaaggagacatcacaaagcccggcagcctccatatcgagtacttggatcaggatcctgatttggacggtccggaaaccgtgcttgagcacatttattcgggagattccgtgatgatgcggacgatgaggacgtatgagcaggcgcttcaggagctgaatacggcgcctgatgatccgaagaagcaggaaaacctgctggcggcgcaggggaaaatggacgaacatggcgcctgggacgcgaatacggcggcaaaaacgatattgacgaagcttggcgtcgcggatgtggcaaaagaagtgagctccctttccggggggcaaaaaaagcgtgttgcgattgcgaaaacattaattcagcccgctgacctcctcattttggatgagccgacaaaccaccttgacaatgaaacgatcgaatggcttgaaggctatttgagcgggtatccgggctccgtcgtcctcgtcacccatgaccgctattttttaaaccgggtgaccaacaggatctatgaactggatcgagggcgcctatacacatacaaagggaactacgaagtgtttttggaaaagcgggccgaaagagaagcgctcgccgaacaaaacgaaacgaagcggcaaaaccttctcagaagggagcttgcttggctgagaaggggggccaaagcccgttcgacaaagcaaaaagcaagaattcagcgggtggaggaactaaaggagcaggacgcgcctgaaaccggttcttcccttgatttcgcgatcggctcccaccgtctcggcaagcaggtgattgaagcggaaggcgttgacatcagccgcggcgggaatcagcttgtccgttcattcaatgaactgattgtgccgggggaccggatcggcatcatcggaccgaacgggatcggcaaaacaacactcttaaacgcgcttgccgggcgcattaagcctgacggaggacagatcacgatcggccagaccgtaagaatcggctattatacacaggatcacagcgaaatgaacgatgcgctgcaggtcgtcgaatacatcaaggagacggctgaggtcgtcaaaacggccgacggacaagtggtcacagcggagcagatgctggaaaggttcctctttccgcggagcgtgcagcgcaacttgatccgcaagctgtcaggcggggaaaagaggcgcctttatctcttgaaagtgctgatggaggagccgaacgtcctgttcctcgatgagccgacaaacgaccttgataccgagacgctcggcgtgctcgaagattatttggagcagtttcccggcgttgtcgtgaccgtatcccatgaccgctatttccttgaccgcgtagtcgacaggctgcttgtatttgaaggcggcggaaacgtatcgcgttttcaaggttcctacagcgaatatatggagaagcaaaaggagaacagccgtcaaaagccggcgtctgaagccgcagaacctgtcaaacctgagaaaaagaaaaggaagaaactgtcttataaagatcagctggaatgggacggcatcgaagacagaatcgccgctctggaagaaaagcataaacggcttgaagaggaaatcgccgccgccggcagcgattttgccaaaatccagacattgatggaagagcaggcgcaaacagccgaagagctcgaagcggcaatggagcgctggacagagctgtcgctgttgatcgaagagcttgaacaatcgtaagtgagactgccgggaaatcccggcggttttgatatggaaaaaggagtttgaacaaatatgccttttgaagaattgctcagctgtctgctgatggccgcattatgtgttctcttgtttataaaagcaatgggctgccgcaaagaaaacagaagaggctcgctggcattctttatgatgttcagcatcgtctgcttgaccacgctcatcattaaaattgtaaagctcggccattttttcggccgagctttttaacatttggaaaacgacagccgcgccacggcatcgtgcaagtgaatcgattcttcgttccggcattcgatctcaaaggcggagatccagtccatttcgtataagtcggcagctgttaagcggaggacgtcttctacaaatcttggattctcataagcctgttcagtcactctcttttcatcgggtctttttaagacgggatggagctttgcgcttgcgttcgtttccgctgcggcaagaagctcggctttgaaatcgtccggcatctccgcctgttcattgatatgcgcggtgatcttgattatgccgcgctggttatgggcgctgtattcgctgatttcttttgaacaagggcagagcgtcgtcgcatgggcggtgatgccggcggtttgcgaaaagcctttgttttcatgataagagactgtcatatggatatcggcatgcatcagtccggacaatttggtttccgggctgatgcgttcgaaataccatggaaaactgacggagacggatgcgctttcctgttccatattgccggctaaatcctttgcaaaatctttcagtgtatggaagtcaaccgtccagtttgcttcgtgatagcgctgcagctgttctgtcaggcggctcatattgattcctttgcggtcgcgcgcaaggctcgtcgtaaaggaaaaagcgccgatcgtcgtttgtgtaaacggcttgagcgaggaagcaatcaaaatcggatgcgaaacgtttgagacaccgacatggtcaatgtcaaaaaaatagtcgttcggtgtattttgaatatccttcatctgttctttatcagtcggttttattcctttcacggcttcgacagatccgaagcggcggtggcgttcgggttttgcggggaaatgcagtttgcgttccattgatgagacccctttcttcagtaaatcgaaatagttcctatttattttgaggcaatgctgtgataaaatcaagtggtcatgtctaaagcatgcaaattaaatcgaaatgatttcgtttagggagtggttgttttgcagcatagcgaaatcgtcattgttggagcgggacccgcaggtattggaatggggatcgttctgaaaaaactcggttttaaatcgtttacgattttggaaaaagaccgtgcaggagcttcattccgaagctggcctgaagaaatgaaactgataacgccgtcctttaccgggcagggattcggggctttggatttaaacgctgttgctccgggaacatcccctgcctttacttttcaacgcgagcacttgagcggacgggagtatggagattatttggcgcttttggccgatcattttcagcttccaattcaagaaggcacatcggttcgcagcgttcataaagacgacggcggtttttcagttgaaacagataaaggcactatgaaggccaaagacgttatttggggagccggtgaattccaattcccgaaatattcgtttcatggtgcagagattggcatccacaacagcaaggtcgccagatggagccaatttgaaaaagctcattattacgtggtaggcggctatgagagcgcaatggatgcggcggtacaactggcgtcctatggcagcgatgtgacggttgtgatgccgaattcgctccgcgaaaacgctgaagccgatccgagcaggtcgctttcaccttacacatgggagcgtctagaagatgcgtatgaaaaagggaaggttcagtttttggaaaaagccgttgtagagaaactggcgaaaaacggaccagcctatgatttatatttgtcagacgcgaggaagatccgttcggaaacacggccgattatcgcgacaggctttcattccggcgcaaaacaaatcgagcatttgtttgaatggggagagaacggcaagccgcttttaacaaatgaagacatgtcgaccgtgacggacggtctttatttaatcgggccgagcgttcagcatcaaaacgcggtcttttgcttcatttataaattcaggcagcgattcgccgtcatcgccgagcatttgttgaaaaaacgaaggttttcgatcgatgaaaaggtgctgacagaatacagggaaaatcaaatgtttctcacagatttgagctgctgtgaggtgcagtgtgaatgctgaaagaaccaacgcgacggcagcgcatgctcttcatcggactcgaatcggtcggaaaaacaacgcttttttcagcgatcactgatcagagggcaggcgaagcagcaaatgtgaaaggatcgacgatatttgcggctgaacgggagatcaaaagccttccgggctggcaagccattgatacaccgggcattcgggaggatggcagcgtgtcgaaacgagcgctgaaaaaagagatcgaaaaggccgatgaggtggttgccgtcttgcgcggcacccatttttctgaagagctgaacgcggtcttggagctgattccgccggaagcccggcgcgtctgctttatcgttacgtttcaggataaaatgacggacgccatgcgccggaagctttctgagcaagtggccaagcacagtctcccggtcctgctggttgatacgagaaccgtgacagacgataaaaaagagcggatcatcgcttttttaagaaaagaggctgaatttcatccgctcaaacggaggcggatgaaacagattgaacttgaaagtgtggctgttcagcagtctgtgtttcatcgtcccgtagcggggcctgtagtgagcgctgcacttttatgtttgttgtttatggcgccgatcgtattggcttatcatacatcagagtgggtgcagcaatctgcggacaaatgggcggttgaaccgctccaaaatgcggtcgggggcttgccgtcatggctgggcgcggcattggcggggaactatggcctgttatcccttggcatttactcgtttgtttgggcgtttcctgtcgttttgtttatgtctatagcgaatgcggcagcggatgattcgggtttaaaggaccggatcgtcgattcattggacccgctgatgcggaagatcggtctgaacggccgtgatttagttccgcttttgaccggatttggctgcaatgtcgtggccgttcagcagacgcggtcatgcagcatgtgtacgagaaagcgctgtgtatcgtttatttctttcggatcagcgtgcagctaccaaatcggtgcgacgctgtcgatttttcatgctgcgggaagggagtggctgtttattccttacctcgctgttcttgttgccgcagcggccgttcataaccggatatggtatcgcatcgatcagaaatgggccgcttacttcgagcgacggcaaacgtttttgcagaagccgtcctggaaagggatcgtctttcgagtaaaagaagtgcttcagcaatttatctttcaggcgatgccgatctttctcatcatttgcctggcggcgaccgtattgaatgaactcggtgtcatccgtcttgtgacattgcttgtctcgcctgttttaagcctgttcggcgctccagaagatgcggcgcctggccttgttttttccctgatcaggaaagacggcattctcttgttcaatgaagggaatggagcgcttcttgacatgctgccgggagcaacgctctttctgctcatttacttggcatcaacctttactccatgcatggtgacggtttggacaattgccaaggaactggggatgaaaacggcggcagccattatgggaaaacagatggccacttcagtcgtttcggttttgatcatcatgatcatcttgaagctgacgctttgcatttttaaataaagtgtggtgaaataaaatataaatcgtaataattacgatttgataagaggaaggagaatgaaaaaatgagtaaaaagattcctgtgacagtattaagcggatacctgggggcgggtaaaacgacgctgctgaatcacatattgcaaaaccgccaagggctgaaagtcgccgttattgttaatgacatgagcgaagtcaacattgatgcagggcttgtcaagcaaggcggcggcctgtcgaggacggatgaaaagctggtcgaaatgtcaaacggctgcatttgctgcacactcagagaggatttgctggttgaagtcgaaaagctggcgaagcagggaaatattgattatatcgtgatcgaatcgaccggtatcagcgaaccgatcccggtcgctcagacgttctcttacatcgacgaagaattgggtattgatttgacccggttctgccgtttggacacaatggtgacggtggtcgacgccaatcgtttttggcacgattttcagtcgggggacagcctgctggaccggaaagaggctgtcggcgaagaggatgaacgcgacatcgccgatctgctcatcgatcaaatcgagttctgcgatgtgctgattttgaataaatgcgaccttgtctccgaggaagatctgcaaaagcttgagaaagtgctgaaaactttgcagcctaaagcaaacatcatcagagcggtcaaaggagaggtcgatccgaaggccgtcttaaacaccggtctcttcaattttgacgaagcgagcggttcagcaggctggatcagggaattaaaccaaggacaccaccagcatacgcctgagactgaagaatacggaatatcttcgtttgtatacgaagcgcgccgtccttttcatatagagcggttttataactggattcattcgctgccggaaaacgtcgtcagggcgaaaggaatcgcctggtgtgcgacgcgcaacacccttgcccttttgatgtcgcaggcgggtccttccgtgtcgctggaaccgatctcttattgggtggccgcactgtccaaaccggaacaggaacaaattctcagacagaaccctgagcttttaaaagaatggaatgaagaattcggagaccgccatacaaagctcgtctttatcggattggatctgtcgccgtctgaaattaccgcagaagcggatcgatgccttttaacagattcggagatggcggccgactggtcgcttttatctgacccgttcgattggcagattgaaagagctagataattctaaaaaaagacaaaagagagacatctcttttgtcttttttatttccaacaaaccggtgttttggacgcgatgttgacatatcaggaaaggaatactaatattttattgtaatgttaactctaattaataataggttaacatatgaacgagaagggggatgaaagcatgaagggggaagcgtattacagtgtgagaatgagagcctccgagaacggtccccatgaagaggggggaaaacacatatccggaggagagcggcttgtgcctttcatcggtttaaatgatgccgtcagcgatttattggaaaaaggtatgtctcattcgcggggcaggccggactttatgcaaattcagttcgatcttgtaaacgaaccgataaagcttgttcaacctttgcgcattgaaacgaatgaaacggtatcagcggaagaaggacaagcgctcgcccgtgagctgatcagccgcgccggcgtgccggaaagcgcggttgaaaaagcgtttcaaggcattgccgaatactggggcgtgaggggcgccgttttgtttgatattcattccggccggcggattgacggaagaaaagaaaaaggagtgcgcgtctcgcggctcgattggccggaagccgattttcaaaggtgggccgctttgtgcggggtgccgccaaatccacggttgaaagaggcgcttgccatcgcctcaaaggtatgtgagcacccggccgtcatcgccgaattatgctggtcggatgaccctgattacataacgggctatgttgcggctaaaaagctgggttatcagcggatgacaaagatgaaagagcatggggacgaaagcggctgccggattttttttgttgatggatcagcagatgtaaaaagctgcatagacgatttggaaaaacagcctgtattcattggtcaggaggtaaatcatgaatcaatcattcgttgagaaaagcaaacaatatctttggctgccttttacccaaatgaaagactatgacgaaaacccgctgatcatcgaaagcgggcagggaatcaagctgaaagatatcgacgggagggtgtactacgacggattttcttcagtatggctcaatgtccatggccatcgcaagaaggaactggatgaggccatcaaaaaacagctcggcaaaatcgctcattcgacattgctgggaatgacaaatgttccggcgacagaacttgccgaggtgttaatcaagatcacgccggaaaatctgacgcgtgttttttattcggacagcggcgccacagcaatggaaatcgcgctgaagatggcctttcaatattggaaaaacatcggcaagccggagaaacaaaaattcatttcgatgaaaaacggctatcacggcgatacgatcggcgctgtcagcgtcggtgcaatcgagctcttccaccatgtatacgggccgcttatgtttgaaagctttaaggtgaacgttccatacgtataccgctcgaaaagcggcaacccggacgagtgccgcgatgaatgtctcgcagaactcgaacggctcctgagcgagcggcacgatgagatcgccgcgatgtcggtcgaatcgatggttcaaggggcatcagggatgatcgtgatgcctgaaggatatttggcaggcgtccgggagctctgcacgaaatatgacgttttaatgattgtcgatgaagtggcgacaggattcggccgaaccgggaaaatgtttgcctgtgagcatgaacgtgttcaacctgacttgatggcggctggaaaggccattaccggaggctatttgccgatcgccgtaacgtttgcgacagaggaaatttatgaggcgttctatgatgactacaacaaactcaaaacgtttttccacggccactcatacacggggaaccagcttggttgtgccgttgcgctggaaaatttgcgcctgttcgaatcggaaaaaatcgtcgctcaagttgcggaaaagtcgaaaatactggaatcgctctttcatgatctggcagcgctccctcatgtcggcgacatccgccagctcggttttatgagcgggatcgagctcgttcagtcgaaggaaacgaggcagccttatccgcccgaagagcgaatcggataccgggtgtctttgaaaatgagagagcttggcatgctgacgaggccgctcggggatgttgtcgcatttcttcctccgctcgccagcaccgccgatgacctgcgcgccatggtgtcgattatgaaagaagcgattcaagaggttacaggccgtgcgtattgacgaatggctcagcagccggctcgcaaagacgaaagcagccgggctttaccgctcgcttaaactgcctcaagctgaacgtacgaattgggcgtcaaacgattatttgggcctggcgaacgacaaacggctgattcatgccgcagaaacagcgctccgccgctttggagccggaagcacaggatcaaggctgacgtcaggcaataccgcatggcatgaaaaacttgagcggaaaatcgccggttttaagcagacggaagcggctctcttgttttcaagcggatatttggccaatgtcggcgtgctttcgtctttgcctgaaaaaggagacgtcatattaagcgatcaattgaaccacgccagcatcatcgacggctgccgcctttcaaaagctgatacggttgtttaccgccacaaggatatgaatgatcttgaagaaaagctccgcgccgcacagagccgtgcacgccgctttattgtgacagacggcgtgttcagcatggacggcacgattgcgccgcttgacgaaatcatgctgctcgccaagcagtaccgggcctttgttatcgtagatgatgcccatgcaacaggggttttgggagaagccggcaggggaacgagcgagtatttcggcgtctctcccgatgttgtgatcggtacgttaagtaaagctgtaggcgcagaaggcggcttcgtcgcaggttctaaaacattgatcgattttttgctgaatcatgcgagaacgtttatctttcaaacagctgtcccgcccgcaagctgtgcggcggcatgcaaagctttaaatatcatcgaagacagccgggctaaacgccggcttttgcaatcatcggtgaacacgatcaaacggagtctcgtggatatcgggtttacggtcaacggagaagatacgccgatcatacccgttatgatcggagatccccaaaaagctgttcaatttgcaaacggcctgaaggagaaggggattgaagccccggccatccgaccgccgactgttgcagaaggagagagccggatcaggctgaccgtcaccgcagaacgcaggttgaaagatattgaagatctattagaggggtttaaattaatgggaagagagttgaacttggtgaaatgaagggtttttttgtaacgggaacagatacgggagtcgggaagacgtttatcgcttgcggtcttgccgctttactgaaagagcagcatgtagatgtcggcgtgtttaagccgtttttgagcggcgagctcgctagcgatccgcagagtgatacagctcttttaaagaacatgtctgaaacgcctcttactgatgaagaggttacgccttttatttttaaagagccgcttgcaccatacacagctgcgaagctcgaagggaggacagtcgggctggaagatgccgtgaaccattggaaaaagataaaggatcggcacgagtgcttcatcgttgaaggggcaggcggaattgctgtgccgctcggggaggattatttcgtcagcgacttgatcaaagcgctcgatttgccggccgtcattgtggcgcgtcccaatctcggaacgatcaaccatacgtatttaaccgcccaatacgcaaaacaaatggggatacgcgtgatcggcatcgtgatcaacggcatcagcagccggccgggacttgacgaacagacgaatccggacatgattgaaagattttgcggtgtgccgctcctcggcgttacaccgaagcttgaagacgcttcaccaacacaaattcaccacatgatcaaggatcatgtcgatgtttccttgattatgaatcaaatgcaaatgggggcagaaaaatgaatcagtggatggaacttgcagaacgtgtgctggatggcggggaagtaactgaaaaagaggcgctttccatcttggaatgcccggatgacgacgttcttctgcttatgcatgccgcttttcaaatcagaaaacgctactacggaaaaaaagtaaagctcaatatgattatgaatgcaaaatccggcctttgtccggaaaactgcggctactgctcgcagtcttcgatatcaaaagcgccgatcgacagctaccggatggtcgacaaaacgaccttgcttgaaggcgcaaagcgtgcgcacgatttaaatatcggaacatactgcatcgtggcgagcggcagaggaccgtccaacagagaagtcgatcaagtggtcgacgccgttaaagaaatcaaagaaacgtacggtttaaaaatctgcgcatgcctcggactgctaaagcccgggcaagccgagcggctgaaggaagccggagtagaccggtacaatcacaacatcaatacatcaaaaaccaaccattcaaatattacaacgtcccacacttatgatgacagggtgaacactgtggaaacagccaaaaaatccgggatgtccccatgttcgggcgtcatcgtcgggatgaaagagacgaagcaggatgtcgttgatatggcgaaaagcttaaaggcgctggatgccgactcgattccagttaattttttgcatgcgatcgacgggactccgctggaaggggtcaatgaattgaatccgctttattgtttaaaggttttagctttgttccgctttatcaacccgacaaaggaaatccgcatttcaggggggcgcgaagtcaacctccgctccttgcagccgttggggctgtatgccgccaattcaatcttcgtcggagactatttaacgacggcaggacagaatgaaacagaggaccataagatgcttcatgatttagggttcgaagtcgaatcggtcgaagaaatgaaagccagtttacagcggtagcacgggggagatataacatgacgacagaactgcacgaggcagggccgagcctgaaatcggattcggatttttggagagatccatatctgttttacgatcagctgcggtccattcatcctgtatataaaggaaccgttttaaagcatccgggctggtatgtcaccggatatgaagaagcggcagcgattttgaaggaaccggcatttataaaccgcgttcctctcccagaagcttctactaaatatgaacaacttcagcgattgcagcgaaatatgatgctgtttcaaaatgagtccggccataagcggatgcggacgattgccggcaaagaattcatgccgcagaagacggcaactttccgccctgctatagaagaaaccgtccatgaattgctcgatcagcttgaaaacaagaagacggcggacatggtatcggaattcgcctttcctttggcaagccttatcattgccggcatgctcggcgtcccggaagaggaaaggtaccaattcaggcaatggacggcggatctcattcaaacgatcgatttgacccgtacaagaaaggtaatggcaaaaggcggtgataccgttgccaagctgaaggcttattttaaaaatttaattgaaaagcgaaaagcgcatccttctgaagacctgatcagcacattcgccggtcatgagcagcttgctgatgaagaagtgcttgcgacgtgcatcctgcttgtgattgccggacatgagacgacagtcaaccttttgacgaacgggttgtttttgctcatgacacatcctgaccagctcagtgagctgaaagaaaatccgctgctgattgagtcggccgtcgaagaatgtcttcgctatgaaagcccgacacagctgacagcgcgcaccgcgtcggaggactgcgaaatcaacgggaaaatcatcaaaaaaggagagcacttatatatccttttaggcgccgccaaccgcgatccaaagatatttcaaaacccgcatctatttgacatcacaagaaagccgaatccgcaccttgcctttggagccggtgcgcacgtatgtttaggctcggcattggcgcggctcgaagcgcaaattgccattcccgcactgttggcgcggctgcctaacttgaagcttgcttcaacagacgttccatttcgcaggctaatcggctttagatcgctggccgagctgcctgtcatcctcaattaaagacgacgaaaaaaggggctggcttacaggtgccggccctttttaatctttcttttcattttgggtaatataggtttgcagaagcgcctttaattctttgacttctgcgcgcagttctttgatttcttttgtatcctctttcagctcgcctgtctcatcctctatttcctgagaaattttttgcgcattattcacgatttccccgacgatcaagttgatcataatgaaagtcgcaatgacgataaatgaaacgaaatagagccatgaccagccgctctcggcaaaaatgggcctgaatatgccgcttgcccacgattcgagcgtaaaggtttgaaacagtgtcagaaggctgagctgcaggttgccgaagtattccggcgcgatggcggagaagaacatcgtaccgatgacggcgtacacgtaaaaaatgatgctcatcaggataatgacgctgctgatggtcggaatcgccataaacagcgcgttgacgatccgtcttaatgaggggaccgaagtgatcgtccgcaggacccgcagcacccggaaaatacggagaacgctgacgaaattcgtattgtaaagaatcaaactgccggcgacgatcacgaagtcaaaaacgttccagttgtttttaaaaaagtgctgtttttgaacgaacagtttaagagaaagttcgattacaaatatcgttaaaaacaagcaatccacaataaaaaatactttttgataaggcttaaagaaagcgtaagtttccaaaccgatcgagatggcattcaacacaatgaccgtcgtgatgaatgactgaaacagccggcaattaatcaatgccgaaaccttgctttgaaccgaatatcgattttgatgagtgttcactcttgttatttgtcctcctgttttgatgtatttctatgatacgttacaacagcaggaagatgtcaagtcagttcctttatttttgcatcgaaaacttaacgtttacgtaaaagtataaaggtagtataatagaaaagaagaaaaatctcggggggatatggacgtggagtggatgaagattgatcaaatggccaagcgaagcggcctgacgaaaagaacgatccgcttttacgaagaaatcggtctgctttcttcaccgaagcggacggaaggcggagtccgtctttactctgaagacgatcttgaggaacttgaaagagtgatcagcgcgaaggaagtgctgggattctcgctgcaggagctccagcagttcatggaaacgggcaagcacctggagatgaataaagaaggatacctattgtcgctggataaacgggaacgaaaagaaaagcttgaagacattcagaggatgctgaatgaacagatgagaatgattgatgaaaagattgaaaaatttcaatcattcaagaagcgcttggaaggtatgcaggcaaaagccgagaatgccctacaatcaattgattaaacaagacaaacgctattttcatagcgtttctttatttggaaagaaggtttgatagataatgaatgaacaaccacctgagaactccagtatgtttaaacagccaaaagcggtctgggcggtagcctttgcctgcgtgatctcgtttatggggatcgggctcgtcgatccgattctgccggcgatcgcgcagcagctgcatgcttcccccagccaggtttcgcttttatttacaagctatctgttagtcacaggttttgccatgcttttatcaggcgctgtctcgagccggattggagcaaagctgacgttaatcagcggtttgatcctgatcatcgtctttgcgggcctgggcgggctctcgcattccatctctcagcttgtcggcttccgcggcggctggggactcggaaacgccatgtttatctccactgcgcttgccgtcattgtcagcgtggcttctggcggaagcgcaaaagccattattttgtatgaggctgctttgggattgggcatttcggttggaccgcttgccggcggagagcttggcacgatatcgtggagagcgccgtttttcggtgtatcggttttaatggccgctgctcttttggccatcttttttcttttgccgcctgtccaaaagccgcagaagaaaatttccgtcagtgcgccgatcaaagcgcttcgttataaagggctgttgacgctgtcaggagccgcattcttatataatttcggtttcttcaccctgcttgcatattcgccgtttgttcttgacttaaatgaacggggcctcggctatgtctttttcggctgggggctgtttcttgcgatcacttccgtttttatcgctccggccgtacagcggatcttcggaaccgtccgatctctgatccttctgtttatgctgtttgcagctgatttgctcgcgatcgggatttggacggagcacatggcgctcgtcatcggggcgatcatcatagccggaggtattcttggcatgatcaatacgattttgacaaccgcggtgatggaagccgcgcctgtcgaacggtctgttgcttcatctgcctacagctccatccggttcatcggcggggccattgcgccttggatcgccggtgtgttagccgatcattttactgcgcatactccatattttgcaggatgcatcgccgtgcttgccggcatcgccgtcttggctggaggccgccgttatttggcgggcatcaaagccggtcattaatgaaaaaagcttgtttccctaaaaagaaacaagcttttttgtttataaaactttcgttgtccatgactcgcaattccatgtttctgtcgctatgtccatatagaattcaggttcgtgagagatgagcaggacagagcctttgtattctttcaaagctctttttaattcttcttttgcttcaacatcaaggtggtttgtcggttcatcgagtacaagcagattcgtttctgaattgataagcttgcatagtctgacttttgctttttcccctccgcttaatacggaaaccctgctttcgatatgctttgtcgtcagcccgcacttcgccagggccgcgcggatttcgtactgtgtaaaggacgggaagtcgttccacacttcttctatgcatgtgttgttgttggtctctttgacttcctgctcgaaatagccgatatgaaggtgttcgccgcgttcgacttctcccgacagcggtgaaatttcccccaggaggcttttcagcaatgtcgtttttccaatgccgttggctccgtacagagcgattttttggccgcgctccattctcaagttcagcgggcgggacaacggctcatcatagccgatgacgagctccttcgtttcaaaaatcagctttccggatgttcttgcttgtttaaagtgaaattcaggcttcggtttttccgaagggagctcgatcatatccattttatcgagctttttttgccgtgacattgccatatttcttgtgctgacgcgcgctttgttgcgggcgacgaagtctttcagctctgaaatctcctgctgctgttttttgtaggcggcttcaagctgttgttttttcacttcatatacttcgcggaattggttgtagtcgccgacatagcgggtcagctcctggttttccacatggtagatcagattgatgacgctgtttaaaaacggaatgtcgtgagaaatcaaaataaaggcgttctcgtactcctgcaaatagcgtttcagccattcgatatgctgttcgtccagatagtttgtcggctcatcgagcagcaggatgtcgggcttttccaagagcagtttggcgagcagcacctttgtccgctgaccgccgctcaattccgcgacatccctgtcaagtccgagatcgttgagcccgaggccgcgggcgatttcttcaacttttgcgtcaatcgcgtaaaagtcgttgttggtcagggcgtcctgaatcgttccgacttcttcgagaagcttttcaagctcgtcggggtcggcctcgcccatttttgtgtagatggcattcacttcttctttcatcgcaaataaataatggaaagcgtttctcagcacatcgcggatcgtttgtccgcgctcaagcgatgtatgctggtcaagatagccgacccggacgttttttgaccattctacttttccttcgtcaggctcaagtttgcccgtaatgatattcatgaaggtcgattttccttcgccgtttcctccgatgagaccgacatgttcgcctttcagcaagcgaaaggatatatcatgaaagatcgcccggtcgccaaaaccgtggctcagctttgtaactgtaagtaaactcatgttttgcacctcaagaaatataatctgtattctataagattatatcgaactcggagggaacaataaaagaaaaattgcgaagccgcttttgttttgagatactaggagcagaatcaacctgataaaaggagaaaaacatgacagaaagatggccatttttaaataaagcaaaaccgtttattcaagaaaactggaaggcgtcgggctttcaagatccgacgaatgtccaaaaaaacgcggtcgatctgattttggacgggcgtgacgtgatcgccgagtcgccgactggaacgggcaaaacgctcgcatacgtcctgccgattctggaaaagctggaggcggatcaaaagaacgtgcaagctgtgattctggctccatcccgcgagcttgtcatgcagatttttgatgtgatcgttgaatggaaaaaaggctcggatatcagagccgcttccctgatcggcggcgccaatatcaaaaagcagcaggaaaagctgaaaaaacacccgcacatcattgcaggtacgcctggacgcgtatttgagctgattaaaatgaaaaagctgaaaatgcacgaagtgaaaacgatcgtccttgacgaaaccgatcatctgcttacgccggagcaccgcgggacgatacaaagcatcatcaaatcgacgctccgcgacaggcagctcctctgtttttcggcgactttaaaagacgatgtcgaacgcgagcttcgtgaaatgaccaaggatgcggaagttctcaagatcaagaggtcgaaagaagaatcggcaaaagtcaaacatcaatttctcgtatgcgaccagcgggataaggtgaaaattctgcagaaattctctcggcttccaggcatgcaggcgctcgtctttgttaaagacatcggcaatttaaacgtatatgccgaaaagctcaaatttcatcatgtagaaatcggcgtccttcacagcgaggcgaaaaaaattgagcgcgccaaaatattgcaggcatttgaggcgggagagttcacactgcttctcgcgaccgatatcgcagcgcgcgggatcgacatcgaagatctcccttatgtcatccacgccgatttgccaaacgttgaaggctatatccaccggtcgggaaggacgggaagaacggggaatgaaggaaccgtgatcagccttgtcaaccgcattgaagaagaaaggctgaaaaagctggcgaagaagcttgaaattccgcttcagcggatcgtgtatgaaagaggacggattattgaaagataagaaaagaggcctgccgccggcaggcctctttttatatgaatgctcaggcattgtcggaatcggcgactttgatcagctgcttgccgaggttttttccttcaaacaagcctaaaaatgcctcaggtatccgctcgaaaccttctgttatcgtttcctcatattgaagctgtccgcttttcacccattcggcgagctgtttgattccttcaggaaagcggtccctgtaatcgtttacgacaaatcccttcatcagggcgcttgatttaatcaaggccgtttgtacgcgcggtcccatatcttcttctgcgcttttgacgttataagaagaaatcgccccgcagaccggaattcgtgcaaacttattgatcagggtgaagacggcatctgaaatcgcgccaccgacgttgtcaaagtaaacatcgacaccgtccgggcaagcttgttcaagcgctgaagccatattttccgttgttttataattgattgcttcatcaaaaccgagcttttcttttaaatatgccgttttttcatcagagcccgcaattccgacgactcttgcccctttgattttggcgatttgtccgacggcggagccgactgctccggcggccccggagacaacaaccgtttcaccggcttttggctgtccgatgtccagaagtccgaaataggccgtcaaaccggtcatgccgagaattccaagaaaagcggtaacaggtgcgagggacggatcgattttctggagattgtcttcgcgaaccgctgaatactcctgccagcccaagcggcccaaaacaatatccccttttttgagcttgtctccttttgcagatatcacttcgccgatcacgcccccggtgatcacttcatcaagcggaaatggctcgacataggatttcgtatcctgcattcttcccctcatataagggtccactgagacataaagcgtttttacaagcgcttcaccgttttttgcttccggaatttccgtttcttttatgcggaaatcgtccataacaggtatgccctgcggacgtcttgcaagttcaatttgcttttgcggcataatgattcctccttttacttataacttaccacgtaaaaaagaggtttagcaaaagatcagcggattgcacgaaatgttttcttcagtacagaatcgggcagaaaaaggtgaaaaacatcggcatttctttcatttaaaagatattgattggcattttctcttgaatattggaacatgtcttttgtgataaaaggaagcaatgacaggagataagaagagaggaggtcttcggtgctgcttgccgttctcctttcttccggatcgccgatgttcatgatgatcgaaaagacataatcgatattgatgccgaatcgtctggcggcaaatgattcaaatcgatgagtatcagcttcctgatgaccctctcttgaaaaaatctgcttgaccaaatcgctaatgatccatgcgttgtattgctgttccggtgaaaaataatacacgctaaatcaccccatctaaaagccttgtctatttgttaatgtacctgaattggcaacccttccaaacattttgtctgaaaatttataacaattgtaacattgaaatgaaaatgtcatgacagagcattcctccgtttagccgtgtgaacaaagggtaagttttaaatacaacatgaaaaagggaggagattcatatgaaaccagtagtaagacaatatacaaacgatgaaaaactgatgaaggatgttgaggaactcagggaaatcggagttgcaagagaagatatttacgttttgtcacatgacgacgaccgtactgaaagacttgcagacaacgcggatgccaatacgattggagccgaagagacaggcatcaaaaatgccgtcggcaatatcttcaacaaaaaaggggacgagctccgcaataaaattcatgagatcggcttttcaaaacaagaagcagaacaattcgagaaacagcttgatgaaggaaaagtcctcctcttcgttacggatcatgaaaaagtgaaatcctgggtataatttgcaactgccgacatggtcggcagtttttttaataaaataaaatttgaatgatagcttgaaaggagtagaataataaacgaaaacgatatgaataggaggaaaagctgtggctaaagaaaaagatgcagaacaaaaatcggcactgaacatcattcctcttgcggtcacgattttagtcggagcggttatttggtttattccgtcgcccgccggattggacccgaaagcatggcacttatttgcaatctttgtggcaacgattatcggctttatatcaaaaccgctgccgatgggggcaatcgccgtattcgcattggcgatcacggcgctcactggaacgctgtcgattgaagaaacgctcagcgggtttggaaacaagacgatttggctgatcgtcattgccttttttatttcgcggggatttattaaaaccggtttaggtgcgcgaatcgcctatttatttgtacggatgttcggcaaaaaaacactcggactctcgtattcactccttgtcagcgatttgattttatcgccggcgatcccgagtaataccgcacgtgccgggggaattatttttccgattatccgttcgttatccgaaacttttcagtcgacgcccaaggacggcacggaacggcgcatcggcgctttcttgctgaaggtgggctttcaggggaacttgatcacttctgcgatgttcttaacggctatggcggcaaacccgctgattgccaaacttgcccatgatgtggcaggtgtgaatctgacctggacaagctgggctgtggcggccatcgtcccgggacttgtcagcttgatcatcaccccgcttgtcatttataaactgtatccgcctgaggtgaaaaaaacgcctgatgcggcgaaaatcgcaacagagaagctcaaagaaatgggcccgttcaaaaaatcggaactctctatggtcgcggtctttttgctcgtcctttttttatggattttcggaggcaacctgaatattgacgcgacaacaacggcattgatcggtttagccgtcctgcttttgacacaggttctgacgtgggacgatattaagaaagagcaaggcgcatgggatacgctgacatggtttgccgcgctcgtcatgctggcgagcttcttgaatgaactcggcatggtcggctggttcagcgatgcgatgaaatcgtatgtttcaggattctcctggatcagcgcatttctcattttaattgcggtttactattattcgcattatttctttgcgagtgcaaccgctcatatcagcgcgatgtattcggcctttctcgccgtgattatcgctgcaggcgctccgccgcttctcgcagcattaagccttgcgtttttcagcaacctttttgcttcgacaacgcattacggagcgggagcggctcccgtctttttcggggccggctatattccacaaagcaaatggtggtcaatcggctttatcctgtcgattgttcatattgtgacatggcttgttgtcggagggctatggtggaaattgttgggtatatggtaaaatgaggggcaggagagatcctgtcctttcttttatgtccatttcgatgctgttgatttgaaattccacacttgcggttaaaagtcgtaataaattaaaagctttggaattagcctatctatcatcatatatccgttttatattagttatttctttgaaacaaatgatgtatatagaaatctaatttatgcattgacttacattatttttcatattaacctaatatatgacagatctgtttctgattggacaatcaaaaagaagataaaaaggaagaggggattatttatgaaaagattattaaagagaaagaaaatatttggtactttctctgtggtagctttggtctttattttcggctttagtacggtgagtttagcttataatgagccatattctttcaatatccgatcagcagtaactggagaagctaaacataaactaagcaataaatctaccactataactgctagtgcaagaactattaaggctgaaactggtgaaactctgtcacaaactcataaatatactgtcacaattagcaaaggagtatttactagctacagtaccggtagattaaccaccggaaaaagttatagcaaaaatgtaggaaaagtggctaaaggaacttacagagttaatgttacgaagcacacatattcagattacggaattaatataaaaggtggaggaaggattaaacaataagaatattatgagacaagataataaaattataatatcgacaaatcaagtaacaaaaacatatggggagggtgcttcattatttaatgcgttgcaccctactactctttctataagcaagggttcaattaatgtaatcttagggaaaagtggatcaggtaaaacaactttgctgagtcttcttggtggcatggaggaacctaccaacggccatgtgtggtttaaacagcaaaatttttacaaattaaaggatcctgaacaagctaatattagaggcaataattttggtttcatttttcaaaattatcatttaatacctgaaatttcagtgtttgataatattatcctaccactaatgattaataaaaaggaaaaagacatttcggacattaagaaactgacaaatattttagggattgggcacaagttgaaatcttttcctttccaactgtcaggtggtcagcaacaaagagttgctattgcaagagcaatggcaaatgatccagaaatcatttttgcggacgagcctactggtaatttagatcaaaaaaatgcggaaaaagttattgaacttttagtttctttatgcaaagaatttgataaaacattagtgattgttacacacgaagagaacttgatagagaggccagatcagctttttttaattgaagatggacgagtcaaaactttataaaggtgttgaaatatgttttgggttaaattagcttttaagtcgttgttccaaagaagaaaaatatcttatttaatggttttaataatctctatctcaatggtctttcttattatggtgaacagcgctacagaagaaattctgaaatacacaaaagaaaaggcctatgaaaaatatggtgagcatcatgctataattaacaatcttagtgaaaaggagttcaaagagttaaaaggaatacatagtgtaaaaaaaggaggaggaatttttttagttggttacactgaagattttaatgaatcttcagtcggagcttctattggatggtttgacaaaagtgctttagaattagggcatatacatattttacatgggaggatgcctgtacacaaaaatgagattgccattgaatcatttttaactgactcttttaaaacaaatgacgttattggagcggatgttaaattaaaaataggtgctgttgaggaagtttatcaaatagtaggtattgtgaataactattcctcaaattggtctactccaataaatatagaaaaaggaaagaatacatatccaaatgtttttataagtccgacaaaatttaatgcagataagcacattgatatacaaaaaagttttatcttttcacttcaaaatgaaaatgtagaaaagatcgaacaagaaataaatgaaaattttgagcaacatttgtctagccctgaacaattatatgaaaatgagaatctttttaatgaaggatataaaaactataataggattttctatatatgtttatttttttcgatcattctaatatttggttcgttgtgttgctgttttcgaatatttgaggtgttctatcagaattaccggcaaaaaattgcgatactgagatcccacggagcaaaaaaaaatcatataaggcttcttgttttttttcagagtaccattattgttttagtgagtttcttaatatcttttcctgttggggtgtacttgaaaaagatattaaatcatcaaacatatcgtactgaaaactacagttcttcacctctgttggaatctactctgttcgtcacgatttggctcaccttattatttttttcattatgtataacagcactaattgtaacggaaaaaataagcaaagaaacaattcatactaatttaaaagggaatccgcttatagcaaaaggataccgtgtttatcaatttatagaaaagtttccttttaaattgaagtctttggtgattcaacttacgtttcgatggaaatcttctatattatttattgttatactgtctttctcgatcatgatttttttcttcacccagttaatagccgatgaaacaattgaaaaatccgaagaaacaacaccggattttatactttcatctaagcaactgactgctgaggaacatgtaaatggctatattatcgaaaccaatcaatctgtttcttttgattataaaagtgtagaagatcttcaacgcttgccaggagttgtttatattgataaagttccaaactccctagggagcaccttgctcctaaccaaacaacaactttcacccaatattaaatcttggataaatacctataagctggagaatataaatgttgaaatatctgaggacacaatagataatttagtaccaaataatcttatacctattcctaacgtgaattttgtattagtgaatgacagtgaacttaaacatctccaacgcatgtatagttttgatgaaagttccgtaaggaaagtgaaaaaatcaagatcagcctttattttctttcctgaaataaatcaaaaagaaatgaataataaaattataaatggagacgaagtgaaaatcggcaggattgcatattctgatgaaaaaaaaccaaaatttgaaaattgggatttgaaggtagaacggattatcttgtctccttacttgatgaaacaaaatcagatttctcaagaacgtgagggaattacagttttaatttatgaagaagtggctaaaaaaattggggtttttgatggctataaagaattgacaatatatactgaccattcaatttctaaacaaaaaaagaaggggattattaataagacgaaacaaatggtttcatcaattcctggaagtctgtattattcagaaacagaagataataagagacttgagtcaatttctaattatctatccatacttgggactgtgttatttgcggttactgcattttactctgttttaacattagctgcaacaatgtattctagaatcattcaaagaaaagctgaaattgcaattaatcgagcctttggaaaaagcgtcacagccgtcttgaaagacctgataattgaaatgactatttatttaatattagcttttcttttaagcggaacgatcattctttttcttacattatcaatgcctgaaaactataataattataattatttcaaatattatttttattcagttgctttcacaagtactttatctttgatttcactgtctatcttattttttgtattgaaaaaaataagtatttctgacgctttaaaaactaaggaagaatagtttggtaattagtgtttatgagctatggtgaaaatccacaaaacttgttagtatagtgactaaaaataaaggtgtgaattttaatgttttggtcagttgatttaatgctgctcggtttcatgtgcgcaatcgtctactttttgtacgacattgtgaaaaaccgaaaaaaaacaagtttttttagaaaaatggtgtttgccagttttattgtttatttgagcgtcgtttatcactatacgataggcggaatcaacattccgccgcagccggcatacgctcaaatgaacattcagctcattccgttttattttgttgctgaatgggtgcaaatgcatcagcagagcgggtttgattggtttttttggaattctgtcaagcttacattttttaatgttttattgctcattcctttaggtgtgtatctttccgttctatggaggaaaattccgctgaaaaaagcggcggtttttgtttttttgacaagctttttgattgagagtctccagcttgtgctatctgtgactggattcataatggcgagaacctttaatgtggatgatttaattttaaatacggccggcggtgtaatgggtttctgcctgacgtctttcatgttcggagctaaaggatcaggttaccgcaggaaaggtctgcatttttgaggaaagcgcgaaagatgattcccggctgggcaatcatcttttttagttaaaactgaaaactaaggctattgaatcggtgcgtgcctgtgccgtgttttgccagcccgtgtttctttaagtgcagtgccgcatgcccggcttcctgcaaaatgtcaggagcaagaccgagctgatgatgcccgccgaaaacttttttcacgcgcccgatagccgagattttttcaagtgactgaatcaattggaccggatcagtcgtcgggtagaatgcatagatgggggctccggtatacagcaggtcgccggtaaacaagtagcctgacgccggatcaaagatacagatatgccccggggagtgtccgggcgtatgataaataacgagcggccttgaatcgcagccgactgtgtcgccgtcttgcagcgttcccgacggttcacctctgaacggggtgtatgtttcagcggaaaagccggccggtacaggtttagtgatatctcgagagacatcgcggcgaatgtgctcgatcggaagccctttgattccgtccgtcagccagtctttctcggcttcatgaacgtaaatgcgctgatattcaccgtggcttccgatgtgatcccaatggacatgggttgtgatgacgctgaccggcagatcggtcagactatccgttaccgtcttcatgcttccgataccaagacctgtatcaattaaaacggcttccttcgccccaatcagcaagtaagagtgcacattttcccaatgcccgtattcgctgatcgcatatgtggattcatcaagctctgttacagtaaaccattgaccatctcccattggtttgtccctccttcattttttcaaaggtgcttatccatgcatatcctcaagtcaaatgtgcaaagtaataaaatatatgataagtgagtgtggtgaacataatgagtgatccttacatgcctttgacatccatcaacagcggggtcctggaagagtatgccgaaggtgtattcggtttgacggtgcaaatcgtcaatgtgtattttattttcgatcccgattcgcgggaagccgttttaatcgatgccggaatgcccaagtccgctccatttattttaagagaggcaaaggagcggttcggcgattttagcctaaaagcaatcgttttgacgcacggacatttcgaccatgtcggcgctttggaaggtcttctcgaaacatggccggttccgatttacgcccatgagaaagaaatgccttatttaacgggaaaagccgattatccgcctgccaaaccgcaagtgaaaagcgggctggttgcaaagatgtctccgttgtttccgaggcactcaatcaacatttcgtcccatgtaaagcagctttctgaagatggttcgcttccgtttcttaaagggtggaaatggattgagacgccgggacatacaccgggtcatgtttcgcttttccggcagtcggacagaaccttgatcgcaggcgacgccgttacaactgtagagcaggaatctctgtttgaagtggcgattcaaaagcaggagctgaacggacccccggcttatttcacaatggactggacaaaagcggcggactcagttcggaagctgtcagaattaaaaccggctgcattgttgacgggacacggtgtacggatgaaaggaaacgatttttccaaagagctccttgatctgtcaggccgccttcccgcttctgattcgtaaaatgccatatgctgcccttaaaacattcagccaggctgaatgtttttttatagggaaaaactaaccatttacatgtgatgatggccatccatcgttctatatttcggatgttgttgtataccaaaggaatcattttctgaaattttagacaaaacaagctgatatttcatttataatgcaggtatgcctgaaaggagctgagaaaagatgaacattcaaaaaagggtccaagctttgctggcagctgcggcaatgtttgcaggactgatggtgtctgatgcggttcacgctgcggaaaccccttactatggaaagaactatactcagccagagcaagtgtcatcattatatccggagccggaagaaactttctcgacccctgcttttgtgaaagaaggggaagcctttacgacacaagaagaaatgatgaagtttataaccagtctgacaaagaaaagcccgaatgtcaaaatcgggaatatcggtttttcaattgaaaaaagaaatattcccgtgctttatttcacaaaggataagcaaatacgttccatatcaaaaaaaccgaccgtctggctgcaaggacagatacacggaaatgagccggcagcgggagaatcggtcctggcgatggctgaaaaactggccgggccgtacggcgacaaagtgttggacaagatcaatgtcatcgtcgttccgcgggtcaatcctgacggctcgtatcagtttaacagacggctggcgagcggaatcgacggaaacagggatcatgttaagcttgaatctccggaagtccgcgccattcaccaggagttcaatcaatattcgcctgaagtcgttattgatgcccatgaatacggtgtcggccaaaacgaatttcaaagcgtaggcgaaaaagggtcattaaaataccatgatattttaattttatcaggaaaaaacttaaacattcccgaatcgatcaggtatgcgtctgacagcctttatgtgaacggcgtcagagctaaacttgatgaaaaaggtttttctaatgatgcatattatacgacaggaaaaagcaaggacggaaaaatcgaaatctatgaaggaggtactgaagcgagaatcggacgtaatgcattcggcctccagcctgctctttccttcctagtggaaagcagggggatagacatcggacgcgaaaattttgcaagaagagtcgcggctcaggttgctacacatgagacgatcatcgacacgacagtgaagcatgcagccgagatcaagcgccttgtctccaaagaaaaattaaagctgatacaaaacggcgctaaagtgagcgataaagaccaagtggtcatcaacagtgagtttgcaggcccgtttaaagacacgcttaaagtcgctgatattgcctcaggacaagcagttgacgttcctgtccaatattacagcgcctcagaggccgttcctgtgctgtcaagaactcggccgaccgcttaccttgtccttccgggccatcaagatatcgaacagaagctgaaggatcagggattaaagagcgtgacactggctttcaaacaaaaactcaccgctgaagcgtatgaggttttatcgaaagaaacagcgggagaatctgagggccggccagtgatcaaggtagaaacgaagctcaaaaaacagaaaaaagagtttcctaaaggaacaaaaatctattttacagctcagcagcaaagcaatctgctgtcaatcgcacttgagccggagtcggttgacagttatgtaagcacaggttacattccttctcaaaaaggcaaagagctgccggtttaccgcttcatgctgaacaccaaaacgcttaattttaaggaataatcaccaggcatccgtctttgacggatgctttttagcggttttttgttttttcatacataattgttttaaactgagatcgaaacctatacaataaatatcagtctgaaatctggaaggagagaatccggttggaatcacatgaagaattatggagggaagccaaggccttcatcgagctctgctacggggaactgtcgaagtccgaagaagaaacaaggatgcgcttacataaaatagataaagaaatcagagaaaccggaagctatacacatacattagaagaaatcgaacatggagccagaatggcgtggagaaacagcagccgctgcatcggcaggctgttttggcactctcttactgtcatcgatcaaagaggcgttcaaaccgaggcagaggtgcgggatgcgcttttccaccatattcagcttgcaacaaacggagggaaaatcagaccgttcattacggttttccccccggaacaaaacggacaaaaaaaagtgtccatttggaaccaccagctgatcaggtatgcggggtatgaaactgagcaaggcgttatcggcgatccggcgtcattggaactgacaaaggcgtgtgaagcgctcggctggaaaggcgaaggtacgccttttgacgtattgccgcttgtttttcaaatagatgggcgtcctcctgtgtggtatgagctgcctcgtgaaatcgtcaaagaggttcggattgaacatccggagattgaaggcttcaaaagtttggggctgaagtggtacgctgtaccgattatagccgatatgaagctggaagtcggagggattcattataatgccgccccgtttaacggctggtatatgggaactgaaatcggagcgcgcaacctcgcggatgcagaccgctataatgcgctcgaaaaagtggcagccattatggggcttgatacggagcggaatacttcgctgtggaaagacaaggcgcttgttgaattaaatactgcggtgcttcactcctataaaaaagccggcgtcagcatcgtcgaccaccatactgcggcaagccaattcaagcggttcgaggagcaggaggctgaagccggaagggagcttgcagcaagctggacgtggctgattccgccgttatcgccggcagcgacccatatctttcacagctattatgaaaataaaacgctgaaaccgaattacttttatcaggaaaagccttaccttaacaaataaaatcctcaggaaaagcggctacccaacaatgccgccttttctgaggagaagctaaaaggctccaaatcggagcctttttgaatcgtctcagcttttcatattgatttccttccggtacaaaacataagaataaatatagggcgccaaaaccgttgccaaaataaccggaagcatgatttctggactgattgataacaacccgtccgcagctattagaagtcctgccaaagtaaatactttcgccgcaaatctgtgggtttttttccagattgaatcactgctcaatgtccaagggttcttgatcccgaaaaaaaagttggagcggactctcggtaggtaattgcctatgacgattaatagagcgcctacaagaaccggtacgatgctgcccgccggcagatcatacccgagcccggtcatgataacaagcacgttgatcagagaaaatataagcagcatggcattgatgagaatgtaataagtcttcgaaaaaagctgatagttttttctgcgcggatcgattttcggcgttaagaacatcaagacatatacaaaaacgagcagcccaatcatggcaagcatcgcttccattttggaagcatacctgtcgatttcccccgaagatgaccaatggattggaacttgaccggaaatgtgcggataagcgattgcccacatgattagattcatagcgattatagcgagcgaaaaaatgtgttttctcattttgcatcccctttatctttgccggcttgttcagtaaaactgaaagcccagccgatgatttcttgaaacattgtagtgtttagcgagtagatgatgtattggccttttttttcatcctgaattaattcagcctgttttaaaatttttaaatgctgagaaatacttggtttagacatttgaaactggtcggaaatttcaccggcggtcatatcccggtccttcagcaggttcaaaatctttcttctcgtcggatcagctagagctttaaaggtttgattcatatttagcatccttagaataagtatttagttatttaactaaatactaaaataaaagaaaaatttagtcaagatttattaaaaaaatccgccatctccggcggatttctcaatagctgatattaaacttttggaatccgtccaattctttggtttcttccacttttacatccgttacttttgagaatggacttcctttttgaattgcttttaaaaattgcttcaggctttcctcaagtccctcggcgcggatttcaactgtgccgtcgtcgcggtttcgaacccagcctgtcaatttgtgtttatctgcttccatttgaacaaaatagcgaaatcccacgccctgaacgcgtccgtctacaatgattctgtattgaagcatcgagaacaccccttttcttttatgctaccatatttcccattttgagatcatgggatagacatgtttcggatgaatcgttaaaatatgaaaataaaggaagggcgtgaggttttggaaaatcaggagtatgaaatcatatctattcatgtaggccgtccgcgtacatacgaattcgacggtaagcaggtggaaacggcaatcgtgaaggagcctgtcagcggacctgtctatttgagccgtacgaattttgaaggggacgggcaggcggatctgattcaccacgggggagaggataaagcggtttgcgtctatccggcggatcactacatgtattgggaaagcgtcttgaagcgaaagctgccagaggcggcatttggagaaaacgtgacagttaaagggctcaccgaaaaagaagtgtgcatcggcgatatctttaagctgggggaagctcttgttcaagtcagccagccgcgccagccttgtttcaagctggccaaacgtctgaatcaaaaagatatggtgttaaaagtgagggacaccgggtacagcggattctatttcagggttctcgaagaaggaattgttgcgcctgattcgcggctgcagctcgtttcaagagatgcgcatgaagccacggtctcgtatgccaatcatttgatgtaccatgacatgggcaatcacccagccattcggaagatccttgaggttgaagcgctgtcggaaagctggagaagctcatttttaaagcagctgagcgcataaaaacaagccgtgtctgaagaggaacacggctttcagcgtgtcgacaaaccctcgcattcgttgtcaggcctgctaagtcggtgctcacgaatagaggaaggatcggcggctaaccgccaggcgtcctgcctgaacgccgccgtaatcacctcctgtgaaagtctgcttcgatgctcggccttcctagactgcaagggttgcgggtcacgctgagcttaaaggatgtttattttttgacgctttcaagcaggttggccaaaaagtgttttttatagctttgaagctttcttccttcatacttcgtcattcccagctttttcagttcttctacataccagcctttgcttccgtaatgcatggcagaaaactcccttctatatttcgatgcaattgggattctaacatctatagaaaaacgctgaaaagggataggcggcaatttttaaaaactgagtctttcgacatagtctggaagtttgagggcaggcgtcagccgtgtgtcaaactggtgacgatcatcacaatgatcgcgatgctgaggacgatcccaatatattttaagaagccgttcttttttttatgagcatatacgattaacaggatgctctcgataaaaaagatcagcccgatgatggcaaacagcatgcggtaaagctcctttcggcacagtttgtcttttattttagcataaaagcccgcgcttctatgagccgggcttttttatgcgtaatcagtcaagctgtgttaaaatgatcggttcgtttttcgtgatgacgatcgtatgctcgatctgcgccacaaagctgccgtcaggcgttttgaatgtccagccgtctccggcttcgatggtatgttctgcttttgtggaaacaaacggctcaagggcgatgacggttccgtttttaaagagcgcattatcaaacgggtcatagtaatttaagatatggttgggcgcttcatggaggttccttccaatcccgtgtcccgtcaggtttttaatgacggtaaatccgtttgcttttgcttcattgtatacggctctgccgatttggttttgtttcttgccggcgcgcgcctgcaaaagccccttttgaaaagcgctttccgcactttggcaaagcttgtgcagcatttcatcgccttttccgagtacaaaagaaatgcccgtatcagaatagtagccgccaaattcagcggagatgtcgatgttgatcaaatccccttcttttaaaattctggattcgcttgggatgccgtgggcgacttcatcgttcacactgatgcacgtcgttcccgggaagtcgtattctttttccggagccgatgcggcgccatgggcttcaagcacttcttttccgatgagatccagctcttttgtgctcatgccgggagctgcttttgccttcatttcctccctggctaaagcgacgattctgccgattttcttgagcccttccagctcttggtcattcgttacaatcacaattcattcccgctttctttttttatattccatttcaagcttaccatatttgtttgcgaaaaaggaacagagcggcttcaagacaaaaaaagcacccgcttatttagaagcgggtgctgtctgtttattgtccggaatccgatttcgttgtttgcgccgcatcagattctgatgttttcggattgtggttggtatagtcgtagtcgctcggattgatcgctttaaagcccttcggtttatagaagcgcagcaaatctccgtcgacgattttatccgacatttcgagttcttttttcacggcctcttcgatgttcggatcgatgtctttttcgttcagtagctctcctgttttcgtgtcatagtagtttccgttcgttttcgtatattccggagagacgaaatcgccgttgcggaacggaataatttcacggtgttccggtgacagaaggtctgaaccgctcatcaggtaatctttcgtattcacgcccatcaaatgaagcagggtaggggctacatcgacttcgccgccgtatttatgggatttgattcccttgaccccaggcgcgtggatgaacagcggcaccctttgcaattgggcgttttcatatggtgtgatgtctttgcccaaaactttggccatcgctttgttgtgattttcagaaataccgtagtggtccccgtacatgacgacaatcgtattatcatacagtccggcttttttcaggtcgttgaagaattgttcaagcgcctggtccatgtagttggccgactggaaataatggtcaacgacgctgtcgccggtatccccggcagggaagtctgtatcgccttcatccatctcgaacggaaaatggttcgaaagggtgataaacttcgtatagaacggctgtttcaggcttttcaacagcggcattgattcttcaaagaacggtttatctttcaacccgtagtttttcgttttatcttcgctcatatcgtaatacgtagcgtcaaagaatttgtcataaccgatggctttatacatttcattgcggttccagaacgttttgtagttgccgtggaacgccgctgatgtatagccttgagacttcaaaatggccggagccgactgcagcgtgttttgcgctttattaatgaacactgacccttgcgataaaggatacagcgagttgtccatcataaattcggcgtcggacgttttaccttgtccggtttggtggaaaaagttatcaaaataaaacgtttcattgtcgtgcgccagtgaatttaagaatggcgtgacttctttgccgtcgagcttataatcgatcaggaaggtctgaagtgattccagtgaaatgtaaaccacgttcatgcctttcgcttttccgaagtattcgggattcggcttatcatgattggctttaatatagttctcaacttccgttacgtcgctggaacttgccagtgcgcgctggctgtttgacttgatattttgcaccgcatcatagattgtgaagttgtaggttcccaaatatttcacaaggtagttgcggtcaaaagaacgggtcagaagctccggacgatcgatctcggcaacggccaggttggcgaggaagacgaggatgcttgctcccatcacaattttaaacggacgcttcgttgctgtttcagatggtctgttatagaaaacagccagcccgattaaaataaaggtgtcgatgaaatacagaacatcaagcgggtgcataagcgagaagatgctgtccccgagctgtcctccgtttgtttttgcctgcatgattgtaggcagcgtgataaagtcgctgaaaaatctgtagtatacaacgttcgcatatagcaaaaaagacattaaaaaatgaatcactataatcgctgtctgctgtatttttttcttgaacaagagtcccaatccaagaaagaacaagcttgagctaatcggattcacaaaaagcaaaatgtgttgtactgtgttggttattcctaaattaaattcaattacatacgcagcataagtttttagccatagcaatatagcggctatcaggaagaaggcaaggcctctttccttaataaatcttttcaattgttacactccttttttccggatcagtaaaaaccatcggaacgaaagaaaaaaacgaatgtataaaatataccatgaaataccgatttagaaaagcggaaaccggccttgcgaaaaaaatcgcaaaacctctgtcaaatcagggttttacagctttaaaaaagatgtttgggaatattttacgcttgtattgcattggcgggaactgatctttatggcagactgttgttagtatatgaacgaaaagggaggatttagaccatggatttttcgagcatcgtttctgaagacaagattaagcaggccattaaggacggcgaattcgaagggcttccgggaatggggaaacctttgaaaaaagacgatgccgcccatgttccagagcatctccgcatggcttacagagtgatgaaaaacgccggaatggcgggggatgaaggcgctttaaagaaagaactgatgacgattgacgacttaatcgcaaagtgcgcggatgaagacgagcgcgagcgtttaattgagagaaaaacagaaacccggctcaggctcgacaggctcgccgacaaaaaaggcatgttttccaagcctgcctcagcgttttataaagaaaaagtgtaccgaaggctgagcggaaataaaaagcgctaaaagcaggtttatttctcccctgtagtggtattgacccgtaaacgaacaaaagggtgataggatggaacgattattgaattgggttgaatacatatcagattggctgtgggggccaccgctgatcatactgctgacagggacaggagtctacttgacgatcctgctgaaattttttcaatttcgctatcctctctatatctttaagcagacgatcggaagtgtcggcaaaaagccgaaaggagaagggacggttacaccgctgcaggctttgacatcggctctcagctcaacagtcggcgccgccaatatcgtcggtgtgcctgcggccatcatgttcggcggtccgggagccgttttttggatgtggctggtcgcgctgtttgccatggcgatcaagttttcggaaagcgtcctcgccgtccactacagagaaaaaaatgaagaaggcgaatatgtcggtggaccgatgtattacattacaaaagggctctccatgaaatggctcggcgtctttttcagtagcgctgatgatcgaacttgtaccgagcatcatggtgcagggaaattcggtttccgcatcgctggctgagacgttctcgttcaatcgtttatacaccggaatcgggattgcttttttgatcggtttagtggtgatcggagggattaaacggattggaaaagtgacggagctcgcagttccgcttatggcaggggcgtacatcggggccggtttcctgattgtcgtcacaaacctttcctctgtacccgcttttttctctctcatcttttcgaatgcgtttacatcttcttcggcattcggcggctttgcaggtgcggcagttgccgaaaccgttcgctgggggtttgcacgaggcctttattccaacgaagccgggatggggacggcgccgattgcccacgcagcggcgatgaccgaccaccctgtgagacaggggttctgggcggtgatcggcatcgtggtcgatacgctgctgatttgcacgaccaccgccttcgtcgtgctcacatcaggcgtctggaccggcgaaaacgcatcaagcgatccgggggcgctggccgcagccgcatttcgcagctattttggccctgtgggcggatacttcgtctctgtctcgctcgttttctttgtcttatcaacgatcacagtagtcattttttacggtgtaaaacaagctgaatttctgttcggacggctcgcgggacatgtgattaaattcatctacctggccgccgtcgtcatcggtgctgccggaggagcaaaggcgatatggggattcctcgatctcgcgctcgttttcattcttcttccgaatattttggcggtgctgctcttgagcagaaaagtaaggtctttatatgatgagttttttacatcagaaaagtattatttgaaagacatcggtcagcaggacggcgtttatgaaggtgacgaaaaagtgaacaatttatgatcacagccggtttgttcccggctcataaatcggaggaagccttgctctcctacgttttatgaagggaacatccggctttttttaatttttgaaagcgctacaaaaatatattgactacttgtatatacaggaatacaatatacctataacgtgtatatacaggttataagaggagaaggagggattggaatgactgatttgaatcaatcagcgcgacggattgtcgatgctgtcggcggtgctgacaacattgcagcggtaacccattgtgtaacgcgtttgcgatttgcattgctcgatgaaagcaaagtcaatcaagaggtgctggagcaaatagatgttgtcaaaggatcgttttcgactaacggccaatttcaagtggtgatcggccaaggaacggtcaacaatgtgtacgcggagctggtgaaggcaacaggaatcggcgaatcgtcaaaggatgatgttaagaaagcctcagagaaaaatatgaatcctttacagcgtgccgtgaaaacgcttgcagatatatttattccaatattgccggcgattgtcactgccgggctgctgatggggatcaacaatatcctgacggctcaagacattttcttcagcggaaaatcaatcgttgaagtctatccgcaatgggcggatctcgctaatatgattaacttgatcgcggggactgctttcgcatttctccctgcgctaatcggctggtcggccgtcaagaggtttggcggaaatccgctgctcggcatcgtgctcggcgtcatgcttgtgcaccctgatttgttaaacgcctggggatacggggctgcggagcaaagcggagagattcctgtctggaatttattcggtttggaagtgcagaaggtcggctaccaggggcaggtgcttcccattttgctcgcttcttatttgctggcaaaaattgagcgctttttgacaaagcggacgcctgagagcattcagctccttgttgtggcaccgattacgctgcttgtcacaggttttgcttcatttattgtcattggaccgattacatttgccatcggaaatgttttaacatcaggccttattgctgtctttgaacaattcgccgtactgggcggactgttatacggagggctttacgccgctctcgtcattaccggaatgcatcatacattccttgccgttgaccttcagctgatcggctcaaagctcggcggaacatttttatggccgatgctcgcgctgtccaatattgcacaaggttcagccgcgcttgcgatgatgtttattgtcaaagatgagaagcagaaaggcctgtccctgacatccggaatttcagcttatctcggaattaccgaaccggcattgttcggagtgaatctcagatacagatttccgttcgtgatcgcgatgatcagttcggggattgccggtatgttcatttcctcgcaaggggttttggcaagctctgtcggcgtcggcggcgtacctggaattttctctattatgagccaatactggggagcgtttgcgatcggaatggcgatcgtgttgatcgcgccgtttgccggaacatatctctacgcaaaattaaaaatgaaataagagagggagaggggcgcgcatatttgtctgcccttttcccattttcataaagaagaaagcggtggtgttgaaaatggaaacaaaagaaaatccatggtggaaaaaagcagtcgtctaccaaatttatccgaaaagctttaaagatacaacaggaaacggtgtcggcgacatacgcggcatcatcgaaaagctcgactacatcaaggagctcgcctgtgatgtcatttggctgacgccgatttatcaatcgccgcaaaacgacaacggctatgacatcagcgactattacagcatccatgaagaatatggaacaatggccgactttgaagagcttcttgaagaggcccacaagcgcggcataaaggtgatcatggatcttgtcgtcaaccatacatcaacagagcacagatggtttaaagaagcggcgtccggcaaagaaaatctgtaccgcgacttttatatttggaaagacatgaagccgaacggcgctccgccgacaaattgggaatcgaaattcggcggctcggcgtgggagtttcatgcagagagcggacagtattatctccatctctatgatgtgacacaggcggatttgaattgggagaatgaagcagtcagaaaaaaagtgtacgagatgatgcatttctggtttgaaaaaggaatcgacggcttcagacttgatgtcatcaatgtcatctcaaaagaccagcgtttccctgatgatgacgagggggacggacgcagattttatacggacgggccgagggttcacgagtttttgaatgaaatgaacagggaggttttttcaaaatatgacagcatgacggtcggagaaatgtcatcgactacaatcgcagattgcatccggtatacaaaccccgaaagccgtgagctcgatatggtgtttaactttcatcatttaaaggccgactatccaaacggggaaaaatgggcgcttgcggattttgattttctaaagctgaagaagattctttctgaatggcagacggaaatgaataaagggggcggatggaacgcattgttctggtgcaaccacgaccagccgcggatcgtctcacggtacggggacgacggaaaataccgcaaaaagtctgcgaaaatgctggcaaccgtgattcatatgcttcagggaacgccatacatttaccagggagaagagcttgggatgaccaacccgaaattcgatgacatctccctttacagggatgtcgaatctctcaatatgtaccgtatcctgaaagaagcagggaagccggaagccgaaatcatcgaaatcttgaaagcgaaatcccgtgataattcgcggacgccggtgcagtggaacggagaagaaaatgccgggtttacggcgggcacaccgtggattccggtgcctgacaactacaaagaaatcaacgcagaagaagcgctcaacgatcctgattcgattttctaccattataaaaagctgaatgagctccgcaaggaattcgatatcattacaaccggcgattatcagctcatactggaagacgatcaagagctttacgcgtatttgagaaacggagcggatgaaaaactgctggtgatcaataatttttacgggaaagagaccgagtttcagctgcctgacgatattgatattgaaggctatgatgccaaggttctcatttccaatgacaccgatcttcccgagtcatttaaacgcttcacagtgaaaccatatcaatcgattgtttatcatcttgccaaaccatgctaaactaagcgtggtggtaaaaaaatgaagatcaacaagtatatgatgatttacaaacaaatcgcggaacaaatcgatcaaagcatactgaatgccggagatatcctgccgtctgaaaacgaccttgccgaacagcacgacacctcgagggaaaccgttcggaaagcgctgaacgtgcttgctcagaacggatatattcagaagattaaagggaaggggtcagtcgtgctgcacagggagaaaatgcagttcccggtttccggtttggtcagctttaaggagctttcagaaacgctcggaaaagagacaagcacgacggtccatgagttcggcttgacgcatccggacgcatatattcaaaagcagctccgcacttccggagatgaagaggtatggcgggttgtcaggtcgcggaacatcaacggagagcgtatcatcctggataaagactattttatccgcaaacacgtgccgcttttaacgaaagaaatatgcgaggactcgatctatcaataccttgaagatgaatgcgggctcgtcatcagctatgctcataaggaaattgtagtcgagccatgtacggcagaggatcaagagtatttggatctgaacggatacgagcacattgtggtcgtgaaaaatttcgtttttcttgatgatacgaccttgtttcaatatacggaaagcagacaccgccttgataaattccggtttgtcgattttgcaagaagagaaaagtagcacggttcgcctgacggcggccgtgttttttttatgaagccgtttctcattacgtccgcattgaatatgctacagcaggtgtaaatgagaaatggaggatgtaagcaatgattcatgaaactgcaaagatcggaaagaacgtggtattgggagagcatgccgttattgaagaaaatgtggtcatcggggacaacgtaacaatcggtcatcatgccattattaaaaaggacactcatatcggcagcggggtgaaaatcggcgatttggccgtccttggcaaagcggcttcttcaaataaaaaaatggctcgccagccgaagcaggcaggagcccctttgcggatagaagatgatgccatagttggagcaagcgctgtgatttaccgagacgtgctgttggaacaaggcgtcttcgtgggggatatggcgagcattcgcgaaaatgtcgcgatcggcagagaaagcattataggacgcaatgcgatggttgaaaacaataccagaattggaagtaaaacaacaattcaaacgggctgctatatcactgctgatatgacgattgaggatgaagtgtttatcggtccctgctgttccacgtcaaatgataaatatatgggaaagggaaactacccgtatcaaggtccaactattaaaagaggagcgaaaatcgggaataacgcaacattgctgccggcggttgtcgtcggggagggggcggtcattggagcgggtgccgtcattacaaaagatgttcccgcaggcaaaacggctgtgggcaatccaggccggttgatgaagtgacggtttttcatctcagccgtgttatataacgtgtctgcataaaaagagagatcataggatatagagcttcaatatctattaaagatcattgcagccacaaattgaagaggaattgggggtggaaaaatgtccattcgaaacgcggtgatgaacgggggttttgagacaggtaccctctcgtcctggttaggcgtaaacgcatctgttacaagccagttttcgcattcaggttttttctctgcgagatttcttggcggaacagtcacatcatatattgctcaatttgttccggccagggcgggggaaggaagcgaatttcttgtttctcttgcgagagcaagctttctcccggcaccttctgtaacgatacaggttacttattttgacagtcaatttaattttctcggatacgggctgtttgccactgtgccgtcaagcagaataccggcagccgaaaatgggacatggcttgaagtctatcaaacaacttcaccggctccctctggcaccacccaggcattcattttgatcaacaacattccgcaggcgggaactgcaagtgtgcttgtggatgatgttgctctattgagtgttgagggtggaggaggtccaacaggagcgacaggtccgacgggagcaacaggagtaacgggagccacgggagcgacaggagcaacaggagtgacaggtccgacaggagcgccgggtccaacaggagtaacaggtccgacgggagtaacaggcgcaaccggcccgacaggtccaacgggagccaccggcccgaccggagccaccggagcgacaggtccgacaggaacgacaggtccaacgggagccaccggcccgaccggagccaccggagcgacaggtccaacaggagtgacaggtccgacgggagcaacaggtccgacaggagcaacaggtccaacaggcgcaacgggtccgggaagtctgttgggaacactggcgcagtcaactgaccctgtttcactcacagttggcagcgaaacaccaattctaacgacaactgttacctcttcagctggacagaatataaaactcgattctatggctgaagttgatattatcatagggccagctactacttttgaatacagtataatttttacattgtatagaaataacagcgctatcgcacaagtgtctgttgattctcaggatgaaaaatcggcaggttcggttcgtgtatatggtgatattcctaaccttacatgggttgatacaccaggggcaggaacacaaacttatgaggttagaattaatgtaacagggactaaccttttggcagccaatgttaatacaagagcgctaaatgctgtaatctttgattgattgtaaaatgaagagtcccctttaagttttcataaagcttaaagggggtttttgtttaaaagattctaatgataaattataaaatttatcatttatagcgattggcgttataaaaattcaaagaaatagagttttatccaaacggtatacatagatatttcatattttgtttgagggatattattatctcaatttttgagaaagggtggtgaaacttgattgaccattgagaatcgaataataaatggagggtttgaaaccggttctctgccgccttggacaggatttaatgccgtagttacttctaatttcagccattcagggatttatagtgttaacttggtaacttcatcgattggaatcttagctcagagctttctggttaacccgggagagaattttgaatttgttatatctatttcaaaagctagcagcgctcctaatcctgcgattgtaataacagtagattattacaactcctcttttgactttttgtcgcagggattaagcttaacaattccagtaaaccgtctatctgcagtaaatgtgtggaatgaaatatatgctacaacgaatagtgctcctcctggaaccgttataggagtggtaactattcaaaaactccctcttagtggggggggcaccgatactaattgatgatgttgcaatgataacaattgatcaaccaggagcgacgggagcaaccggcccgacaggagcaaccggagcgacaggagcaaccggagcaacgggtccaacaggggcgacaggcccaacgggtccaacaggagcaaccggcccgacaggagcgacaggcgcaactggcccaacgggagcgacaggcccaacaggggcaacaggcccaacaggagcaacgggtccaacaggaccaacgggagcaaccggctcaacaggatcaacaggcccgacaggcgcaacgggagccacaggcgcaacaggctcaaccggtccaacaggagtaaccggggcaacgggagcgacgggtccaacaggggcgacaggcccaacgggtccaacaggagtaaccggggcaacaggatcaacaggcccaacaggagcaacgggtccaacaggggcaacaggatcaacaggcccaacaggagcaacgggtccaacaggggcaacaggcccaacgggtccaacaggagcgacaggcgcaacaggtccgccaggagccaccggcccgacgggagcaaccggagccacaggctcaaccggtccaaaaggagtaacaggtccgacaggagcaacaggcccaacgggtccaacaggagtaaccggggcaacgggagcgacgggtccaacaggggcaacaggagcgacgggtccaacaggggcaacaggagcgacgggtccaacaggggcaacaggagcgacgggtccaacaggggcaacaggagcgacgggtccaacaggggcaacaggagcgacgggtccaacaggggcaacaggagcgacgggtccaacaggggcaacaggagcgacgggtccaacaggggcaacaggagcgacgggtccaacaggggcaacaggagcgacgggtccaacaggggcgacaggcccaacgggtccaaccggagcgataggtccaacaggagtaaccggggcaacgggagccacaggcgcaaccggtccaacaggatcaacaggagcaacgggagcaaccggcccaacaggagcaacgggtccaacaggaccaacgggtccgacgggagcaacgggttcaaccggcccaacaggcccgacaggagcaacgggagcgacaggcccaacaggagcgacaggcccaacgggtccaacaggagccaccggcccgacaggagcgacaggcgcaacaggcccaacgggagcgacaggcccgacgggagcaaccggggcaacaggagcgacgggtccaaccggggcaacaggaccaacgggtccaaccggagccacaggtccaacaggagtaaccggggcaaccggagcaacgggagcgacgggtccaacaggggcaaccggagcaacaggaccaacaggggcaaccggagtgacaggcccaacgggagcaacgggtccgaccggagtcacaggtccgacgggagcgacaggcccaacgggtccaacaggcccgacgggagcaacgggttcaaccggagcgacaggcccaacgggagcaaccggcccaacaggagcaacgggtccaacaggggcaacaggcccaacgggtccaacaggagcgacaggcgcaacaggtccgccaggagccaccggcccgacgggagcaaccggggcaacaggagcgacaggagcgacaggagccaccggcccaacaggcccaacgggagcgacaggcgcaacaggagcaacgggtccaacaggagcaacaggtccgacgggagcaaccggcccaacaggcccaacgggagcgaccggaaccacaggagcaaccggcccaacaggtccacagggtccaacgggtccgccgggtgaagcaggaacaatgggagcagctggtccaacaggaccaacaggaccagccagtccacaaactgctatattctttaacaatctatttgggtctactactgtttacaatccgccaacggttcctttaaatacagaagtaactgttgtatcggttcctaatgtatcggtcactagtgggcaaaatattaaggtggattatgcattggctatagaagctgtaaatactgcaaacagtaatataatttttgaaataaggctatatagaggaggaactttagttcaaacaagaatatttaataggagtctcgcggctgccggcactcaaaggtttccattagccagcacaattgttgatacagttcctgccaccgcaacagttgattattcagttagggtagcggtaacaacggcttcaaatgttacttccgctgcagcatttaatagagatttaaatctcattcggttcccttaaagggaggggggaaagctaaatggagctttccctttttgaagtttcatattaagtgaaagaacgttgctttaaagttaatatagtttgattcactcggatttaacttctataaatgtgttttaatcgtatggaaaataacgtgaccgagcttagcaaggagacatagtatatgttagcttcattctcgaaaagggaattgaagctaatctagtgaaagggaggtaaaatcctagatgtcgatccaaaatttggttgtaaacggcagctttgaaaacggggcacttccaccctgggtaggccaaaatgcaaccgtcacaactcaattttctcattcaggtttttggtcggcaagattactgggcggggctgttacttcttttattgcacaatttgttccagtagatgcaggagaaggattggaatttttagtttctctagctaaagaaggttttcctgctccatcgcctcaggtgcaaattcaagtgtcttattttgatagttcatttaactttttaggccaaggtctctttttaaatatcccgttcaacagactaccgattgtccaaaataatacatggcttgaagtctatcaaacgacgaccccagctccagctggctctactatggctttcattttgattaatactttgccgcaggcaggtacagcgaatgtcattgtagatgatgtagcactattagatgtagaaggcggaggaacaggtccaaccggcccgacaggtccaaccggcccgacaggtccaaccggtccaaccggagcgacaggtccaaccggtccaacaggtccgacgggagcaaccggcccgacaggagcgacaggcccaacaggtccgacgggagcaaccggcccgacaggagcaaccggcccaaccggtccgacgggagcaacaggtccaacgggagcaacaggtccaacaggagcaacgggagcaaccggcccgacaggagcaaccggcccgacaggcgcaacaggtccgacgggagcaaccggcccgacaggagcaaccggagcgacaggcgcaaccggagcaaccggagcgacaggagcaaccggcccgacaggagcaaccggcccgacaggagcaacaggtccgacgggagcaacaggcgcaaccggagcgacaggagcaaccggcccgacaggagcaacaggtccgacgggagcaacgggagcaaccggagcgacaggagcaaccggagcaacgggagcaaccggcccgacaggcgcaacgggagcaaccggtccaacaggagcaacaggcgcaaccggagcaacgggagcaaccggcccgacaggtccaacgggagcgacaggcgcaacgggagcaactggagcgacaggcgcaacaggtccaaccggagcaaccggcccgacaggtccaacgggagcgacaggcccaacaggcccaactggagcaaccggcccgacgggagcaaccggagcgacaggcccaacaggtccgacgggagccacaggagcgacaggagcaaccggagcgacaggagcaacaggtccaacgggagcgacaggcgcaacgggagcaaccggcccgacaggtccaacgggagcgacaggcgcaacgggagcaaccggagcgacaggcgcaacaggtccaaccggagcaaccggcccgacaggtccaacgggagcgacaggcccaacaggcccaacaggcccaactggagcaatcggcccgacgggagcaaccggagcgacaggagcaacaggtccaacaggagcaacgggagcaaccggcccgacaggtccaacgggagcaacaggtccaacaggagcaacgggagcaaccggcccgacaggagcaaccggagcgacaggagcaaccggagcaacgggagcaaccggagcgacaggcgcaacaggtccgacgggagcaaccggcccgacaggagcaaccggagcgacaggcgcaaccggcccaaccggagcaaccggcccgacaggtccaacgggagcgacaggcgcaacgggagcaaccggagcgacaggcccaacaggtccaacgggagcgacaggcgcaacgggagcaaccggagcgacaggcccaaccggagcaacgggagcaaccggcccgacgggagcaacgggagcgacaggagcaaccggcccgacaggagcaacaggtccaacaggagcaaccggagcgacaggcgcaacaggtccgacgggagcaactggcccgacaggagcaaccggggcaaccggagcaaccggtccgacaggagcaaccggtccgacaggcccaaccggagcaacgggagcaaccggcccaacgggagcaaccggcccgacgggagcaatcggtccgatgggagcaaccggggcaaccggcgcaacgggagcaaccggcccgacgggagcaacaggtccaaccggcccaacaggtccgacgggagcaacaggtccaaccggagcgacaggtccaacaggtccaaccggagcgacaggtccaacaggtccaaccggagcgacaggtccaacaggtccaaccggagcgacaggtccaacaggtccaaccggagcgacaggtccaacaggtccaaccggagcgacaggtccaactggcccgacaggtccaactggcccgacaggtccaaccggcccgacaggtccaactggcccaacaggtccaaccggcgcttaatatttaacgactattagcaaatatttaccgtttgtttttccggaacttcgctggaatgctatgcgaatgattcagggggcagtaaacctatggtttactgccttttttctattgcttatttctaagaataaaaaaacatccctgtcactattttgtgaaagggatgtttttgattgattagcctttacgttggctaaatgattgaatggctgagactacctgatccacattgacttgatcatggcagggaagggtgatcgtattttgttccagaaaaatggaattcggtttaatctgcctgtatttgcggcggtaataggtagtgccgcttaaacaataagttccgaaagtcgactctatatggcagtcgctcaaatattgaatcaattcgtcgcgaacgatgttttttggaactttgaaaacggcggattgtatgttgtgtacaacgttaggaccgatttgttgactttggaatccgaggggttcaagctgttcactatatgctttctgctgaaggtttctccgatgaatgatgtcatcaagtttttggagctgtttaattccaagagcggcttggatatcggataatctgtagttgtagccgaaatctataaaatccaattttccgtcagagatggcagcgccatggtttaatttgaccgaaagccagtctttcaactcttcccggtcggttgtaattgccccgccttcgcctgtcgtaagcagctttcttgggtgaaagctgaaacaggtgagatcggcaatttttccggatttacagccgtattcgctgctgccgatcgcacaagcggcatcatccacaaggggtaagccgtactccttacaaatttgcttaatgttggtgatgcctgtcgggtttccaagagcatctacaaaaagaacggcttttgtacgggacgtgatttgactttccagttcttctggaagcatgttaaatgtttcaagatcaacatcggcaaaaaccggcttggctcctaaatcttctattacattgacagtggcggggaacgagaagtctgagacgattacttcatctccgggttgcacgttcaggcttttaaggcacatcgataaagccgttgttgccgatgttgttaaaaaagcatgctttgcactgacatactgtctcatatgatcagcaaatgttctgacataagggccttttgtcagcatgccagaggaaaatatctcctttaattctgcttgcacttcttcaaatgtaatatacggctcgatcaatctgatcatgagagatcctcatctttcattcttcggtttttaatcacctttgccggcacgcctactgctatgctgtacgggggaatattgcgattgacgacggcatttgctccgattttggagtgggcgcctatcgtaacgcctgctaggatagacgcaccgatcccgatgttgcagttttcttcaatatgaataggagcgaatgtaagcggcgaaaacaaaatggtactgtcgggtttatcaggatcggtatggtaagcggcatgtatccggacgttcggaccaattcctgcaaattctccgattgtaaccccgccggcaccgtgtataaaacattgctgcccgatccagctgtttgaaccgatgatcaggtcatgcttataatagccttttaaaatcgtgtcatggccgatataaacgttatctccgatatagatgttttccggatgaaaaatgcggaccccgtcttcgataacgacattttcgccgcagcccccaagctgggaaagagtgaattcaccttttccttcgcttttccattgtttcaacaatagcgcctcctttcttattgatccaaattttttttaatgctttcagctgttcttctgatgccttcttccagatcaactttagcgctgaaaccgagcatctcttttgctttattgacctgagggatgcgcagatcaatatcggcttcttttttctccccaaagaagatttgtgattttgatccgagaactctgataatcgtgcttgccaatccgtatacggtgatcacagtgcgttcattgccgatgttgaaagactctccgatggcttccttcatcgtcaaacaacgcaaaattccgtcgatcatgtcatctacgtaacaccaggcccggatttgcgttccatcgccgtgaatatagatcggctcatctaacagagctctgtgaaccatcgttttgatggcgccttcgccgacttgttccggtccataaacattaaaagggcggacggtgacggtcggaagcccaagttctttaaaataggcatatgcaatatgctcctcggcgagtttgctgacagcatatgtccagcgggcttctcccaccgctcctaaaacagtatgactggtctcgcgcgctctgaaagcgatttggccgaacacttcgcttgtactgaaacagacaacccttttgcattcggttaaaccggcagccgcttcaagcagattggctgaaccgatcatgttgacctgcatcgttttaaccgggttttgaatgaccgtgtcaatcccagcgatgccggcggcgtggacaatgtggctggccccctggatcgcctttttaagcgcgttcaaatccaaaatgtctccctgcagcactttcaagtgaggatggtcccggtaaggcttataccggagggagtctcttgaaaaattgtcatatacggtgacgctgttgcgctctatcagctttcctattaaagaggatccgataaagcctgctccgccagttatgaaaatatgctggccggataactctgtcatatcgctcatcaattgttcacctgcttgtttcgtttttttttacatacaaatcccgcgacgggaaagttgttcaacttcattccgaaagtagcgactgataaacagccaatgtttttttgctgtttttcaccatatcatgatgaacttctgcatactttcttcctttctggccgatttccggcagcatatcccggtttttaagcacattttcaatcacctctgtaatgttggcgggatttgctcttataagaggcagttcggaaggatagtgatccttcataaaatcactgatccagcagataacgggtttccccattgccatcgattcgacggcaaataatccgtagctgccgatatgaagctgatcaatgatcaaatcagccttttggtagattttctttgcctgttcatgagaaactccttgtactaggtgaaaatgaaaatcgtatttttcttttaaagattcaaccgccttaaggatgtggcgggttccttttattccgggagaggtgggggcatgaacgatgagcggcttttcatttgacctgtagtcgggagtatagcggtcaagctggatcatggtcggaatcatgtggacatgctcataatagtcttttacatactcgtaaagctccatatcggcgacgatgcagtgctggacatattgggaaattcgtttgaggtggtatcgaattcgagcttcgtttttcgttttgacaacggcgtatggatttgttttagccaatgttgaataaagcctcacatcgctgccccaatgatgcatgaccattggtttctcagcctgttttaaaatgggataatccgacatgtccagcgtgaagcttgtgccgaaatgaaaatggaacaaatcataggatggcaggagatcattggcaagccttctcagcttcgcattcatggcgggcgtattgcgttctttcagcaatgaccaggtgtagtcggcagcgtaatttaaataatacggatagtaatttaaagtgtgggcaagcgcgccatgctgtgagagccctttagccaaggtattcatttgattggcgatttccattgtgccttgcaaaatgcggatttgcccagccggaggttcggttttttcgtcaacaggaaggtcaagcttcggcgcgcttgcggtttctgctccatctcctttttgaagataggctgcgctttctttttcccttccggtgcgcaggcacacttttcccatcagcagatttaaagatctgttttcaggaaaaagatctagccctctccagagccacagccaagcgttatggtcatggccgagataaacagaaagagaggcttgaagaaaataaaagtcaggctcgttatgcgatccctcggcttcccactcctttaggcgcttcatggctttgttccactctttttgttccagacaatgaatgatatctgatttgaaatctttcatgatgacctcccatcgatcatgctgattcaatttctccttttaaatagcagaatacaaaacactttgtgcgctctatcatacgtataaatgaatctatatgactgtgtatttgtgcgagagtgcaagagaaaaaccttccaaagaacggaaggttttatatcagctggatttttttaatatttttcatatatcgttcatactgattgtctgaagcgaggcttaattggaagtactcatccattttgttcaggagcggctgaatgcattcttttttgccgtcatggtctagatgccgggtatatccgttttgtgcgtatctccgggccattctccaaaaggttttcccgatgctgaaatatttcaaggactgtctttgattttcctcaagctccttccatttgatatgaggaaaatagacgctttcgtcaaattctttcacaatataatccatgacgtacacaagcgattgaattcttttatgcaattggtaggaaatgtttttttggtggcggcggtagcataatacaggtttttttaaatagcgccgcttccagccgcgcttcgtattggctaaacaattcagcacatcccctgcaagcggcttttgcggatcaaccagccaagagaagcctttttgctgataataagatgctttaaacatgcccaccatcgggacaatgcctgagccgcccctttgaaaaatcgtcctcaccagctcctcatcgccatactcttgatatgtccacagacccgcatttttcccgtgttgatcaacgagcaaaaggtcgccgtaaacataatccaattcctcttcttcaaaaaaacactgcataaagtcatggatcaccaaattgtgcgggaggaaatcatctgcgcttaaaagcagaacatattcgcctttagcctcttggaagatttctttaaaagcgagatcaggaagttttgtattttcgctgtggcatatcgctcgaatgtgcggatgcgttttttgatagctgctggttttttgcatggagccgtcagttgaatggtcgtcgatgatcagaatatcgatattggggtagtgttgatttaaaacggattgaaggcattcatctatgaaactgctgtaattatagttgatgatgcccactgtaatcagcggcggatttaatataaccgtcaactctgactgccttgcaaagcctgaaatcatctcttcaattttgcgcatgctcagatcatatgaataatgctcttcaataaatgatcgatattgcagaggtgtataatcaccgtttgtcatcatggacacgaattcatctatcgtattccaaacaaccgattcatcgtatatcgtctttgccccgtaaaaattgtgaatcagcggtttaatgcctttagccatcgcttccattgcagacatatgctgactttcaagaaggcttgtgcaaataaggtaatgcttatcctccaagtattgattcatgtcatcctgccatccgtcaaattggacgttgtcagtcagccggagctcatcaatcatttgattgaaatacaactgatagcgggcgtcctgaaacgtcccggcgataaacaatttgtatcttgggtctttgtcaatcagtgctttgaaagcctgcagcaaaagcatcggcccttttttatagttgatatagccgacataagcgatgtgaaagcctttttgcctttgtttaaaagtgtattgatctagcttgattccatttggaacgacggccgttttctcttttttcaacgccttgacttgatccaatacgtattcccgcaaatgctctccgtcaaaaatcacttggtccaccgcttgccaatatacctttttaatataaaaagtaaatgcttcatagctgtggagtctgcatattaatgttttagccgctgcagaagggactttgctcccgtggatcaataaatcatcgcaccattcaaaccagcaaatatccgcccattgcatgccagcgtcgatttgattcaggtcatgaaccacgattttttttgtccggtaagttccggaaaggtgctcaacgacagaattcaaaaaccggtccaaatccggtttgacgaaaaaaatgatttttggacgcctgaccatttttttgaaaaggtcttctttctccttcatgaggcgaggtcgatgttcgcgcctgacaaataggagggcatcatcatataattcagacgctctctgagcctgctgctttttttcacagacaaaagcagcgcttatcagcaagccgggatcgaagggagcggctttcagcttctcttcaagcttctgcgcagcatcgtgccatttgtgatgaaaaatcagttgggatatttcagtttctctccagctaagcccaacagagtctagcagatattccaattcattatccatctgaaacctcctggttaaacacattttcgctagtagcatctatattcaaacgaaaaaagaaagttctatgaaaaatactttggaaatggcgcagccttgaaaatataaaacagtgatagtggcacaaacgcgatcagctgctgtttcatattttatgggtagattttaaaaaagagtctcagggagtgaaggctttggttacaatcagtctatgtatgattgtcaaaaatgaagaagaagtattagcgagatgccttgatacagtgaaagacattgtagatgagattaatattgttgatacggggtcgacagataaaactgtagagattgcgaagcgatacacagaccgcgtctttttctttgaatggatcggcgattttgcggctgcccgcaatgaatcgttcaaacacgccactaaggattatattctctatctggatgcggatgatgttttgcttgaagaagatcagaaaaaactgaaagagttgaaggaaacgcttgatccttccgttgattccgtgtctatgtactatgatgctggaaccgacgaattcggaaatgtgacattaaggtaccgccgcaaccgtctggtgaaaagggagaagaactttaaatggaaaggcgactgccatcaatatttggaggtattcgggaacatcatcaatgccgatatttcagtgacgcataaaaaaatccgccactctgtcggacgaaacctcaatatttaccaaaagaagattgatcgcggcgacacgtttaccccgcgcgactatttttactacggtaatgaattaagagaaaacagacactacgaaaaagcgattgaaagctacaataaaaacattgaaatgaaagaaggatggattgaagacaaagtatacgcctgcatcaacaaagccgactgccaccgctttctcggcgacatggacaatgagctgagatctctgttccagtcatttgaattttctaaaacgcctcgtgccgaaacatgctcaagaatcggctataactttcagcggaggcgggaatacaaggccgctatctactggtatgagctggccacaacattggtgcctgattcaaataaatggagcttcacctatccggcatactatacttggtaccctcatttgcaaatgtgtgtgtgctattacaatttaggagactttgaaaagtcgtatcatcataatgaagaggcgaggaaataccgtcccgaagacaaatccgtccttcataacaaacagctgctggaagggaaattaggcattaacaattagcattgtaaagacttactgaacaagtaggtcttttttttatgaataaaatcaagccgtgccaatttagcggcaggcatcataacttattttggaactttttgaatttagaggaggaacaaaggatgatcccgttagtcaatttaaaacgtcaatttcaaacagtaaaacaggatattttaaaagagtttgaacatgtgctggacagcggccaatatatattggggccaaaggttgaagaattagagaaaagaatagctgaaaagcttggtgtaaaagaagcggtcgcggtcgccaacggaacggatgcattggtgctgacgcttgaagctttcggcatcggcaaaggggatgaagtgattacgaccccgttcacttttttcgccaccgccgaagccgtctcaagggtgggggctgaacctgtgtttgctgatgtcgatcctgaaacatacaatcttgatccgaaaaaaatagaagaaaagatcacccctgctactaaagcgatcattcccgtccatatcttcggacagccggctgatatggacgagatcatggagcttgccaaaaaacacggactgcttgtgattgaggatgcctgccaagcgttcggcgcatcgtataaagagcggcctgtcggcagcatcggggatgccgcctgtttttcatttttccctacaaaaaacttgggaacattgggagacgggggaatggtgacgatttcagacccggatgcagcccggcaattaagaacactcagaacccatggcactagcaaaaaatacttccatgacaaaatcggtttcaacagccgtcttgatgaattacacgccgcagctttactcattcttcttgagaaaatcgacggctggaatgaacaaagaagaagagtgtccagccgctacagagaaggtttgaaaacggcggagcacctcacactgccggcagagaaagaggaccgcacacatatctatcatctctattgtatcggcgcgaaaaaccgcgactacatcatacaatcgctgaaagagcaggacattcattcaggtgtgtattatccttgctgccttcatctgcaatcggtctattcttcactgcagtacaaaaaaggcgattttcctatagccgagtccttgtccgaaacccttttcgccattccgatggatccttttctagccgccgaggaacaagatcagattatttctgcgctgctgaaaaaaggaggaggggaaaagtgacggttcattttggtttaatcggctgcggctatatgtcaagaaaacatcttcaagcactggccgagtgcgatgatgcaaagttgtcggccgtcagtgatttgcaggaagaaagaatgaaggaagcggaagaatactatgcttccctcgccggtgaggaaagccgaatgacccgctatccgcagtatcaagcgctgctttcagatcctaaaattgaagcggtcattattgcggcggtttcgggactgcacgccgaaatggccaaacatgcgctgctggcaggcaagcacgtcatcgtcgaaaaaccgatgaccttgtcattacgggatgccgatgagcttatagaactggcggagcagaacgggctgaagctcatggtctgccaccagatgcgccaccggccgatcatgaaaaaactgaaggaaacgattgaggaaggaaagctgggaaagatctacttgggcacggtatcgctccgcttaaacaggtcccccgcttattatgaagcggcatcctggcggggaagctgggaaaaagacggcgggatgctggtcaatcaagggatacatctgatcgatctgctgcaatggtttttaggtgatgtaaaaggcgtttacggagatatgctgggcggctccggagctaaagaaacggaagatgttgctgtcggtattctgacgtttgccagtcaggcgaaaggtgtagtagaagcgaatatcgtcacacagccaaacaatatcggaagctctctctcgatttttggagaaaatggaacgatttcattggaaggtccggcattaaaccggatcagccgctggtacatccacggggagaaggcggatgctgaagaagcggcaaagctgattgacatcagcggcgaacaaaccgcaatgtatcaaaactttataagcgccctcaagcgccaagacacgctattggttgacggctatgaaggaaaaaaggcgattgaaaccatctttggaatctatcaatctgtgctgcagaagcaaccggtgcagctgcctctttcttcatttcaaacaactgatatgaaaaataaataggttttgttttggtagatcgtccctttcaaaaaaagatttgaaacatagtttattaaaggaatgtacagaaggggcgagttgataaatgagcaaacaggaaattcataacgaaacgatagcggtcatcggcttggggtttgtcggtctgcccttggccatgttgttgatatcaaaaggaatgcgggttatcggtgttgatttggacaaaaagaaagtcgaggcattgcggaaaggaaccagctatatttcggatataaacgatcaagcggtgcaggacggaataggcaccggtttctttcgtcctgtttcggactacagtttaatcggtgaagcggatgccgtcatcatctgcgtgccgacgcctttgaatgatgatgcgggtcctgatttgaattatgtgaaaagagcggcgcaattgattggagcgcacttgaaaaaagggcagctcgtcgtgttggaaagctcgacatatccgggtacgacaagagacatcgtcaaaccgatcctggaaaaaagcggccttgtatgcgggaaggatttttacttggcttattctccagaacgcgttgatccgggcaatcagttcccgattgaggtcgtgccgaaggtagtgggaggagcgacggatgcatgccttgaaaaggtgcatcaattatacagcggcatttatgaagaggttgtgcctgttacatcgccagaaacagcggagctgacaaagctgctcgaaaatacgtaccggtttattaatatttcattcattaatgaattcgcgatgatatgcgacaggctcggggtgaatgtgtgggaagtcatcgaggcggcaagcacgaagccgtatgggtttgcggctttttatccaggccccggcatcggcggccattgcatccccgtcgacccgctgtatttgcagtttgtcatgaaacaaagcggattatcgagcgactttatcgagctgtcggaagcgacaaatgatagaatcgtccgctatatcgcagagcgctccttgcagctggcagggaaagacaaggcgacagacgcccgcatcttaatctacggcgtcacctataaacgaaatatcgcggatgtccgcgaatcaaaatcgcttgatactatagagaagctgatcggcatgggagcagatgtttcctaccatgatccgcacgttccggacctcgacctcagcggcaaaaagctagcaagcgtgccgatagattcaaagatgctgaaagagtatgactgtgttgtcattttaactgatcatgacgcactcccgaaagagctgttattaaaccatgcaaacgtgatatttgatacgagaggagtgctgagggaagcagccggaaaagcaaaagtcatccagctcggaaacgggcgctcctgaatcaatttttctgcagcgactcacgcccagatccattcggaatacaataagttaaaacaagaacgaaaagggtgagggccgtgtggatcggaattctgttgatggtctctgggattgggatcagtattttcgccgttagtctgattgtcagctatttgtttgttttgccgaaccggagcacatatgaagaaacttttttcagcggactcaaacacggcgagatcatcgatgacgtgtttgagtcccacgacaaagaagagctgtttttgacagcaggggatggatgccggctgcatgcgctgctatttcccgttcaaaagagcaggaaagccgtcatcatctcccacggcatcaagtggtcgctgtttggcgggtataaatacgtcgagctgtttcagtccatcggctacaatgtcctgctttgcgacagcaggtgccacgggttgagcggcggttcacacgtttcctacgggttttacgaaaaggatgatttggcgaggtgggctgacgagcttgagaacaggttcggcaaagatctttggatcggggtgcttggcgaatcgctcggagcggcggctgccatcgagctgatgaaacaggatcggagaatcaagttttgtattgccgattcctgcttcagcgatttaacagagctatgccgctttcagctgaaagccgccgtcaaattgtccgtgccgtttctcatcccgttggcaagcgggctgatcaagcggcgccatggctggagccttgctgatatatcgccggtcagcaaccttgagcagtcagacacgccgctgttgatcatccacggcacaaaggatcagcttgttccgccggaaatggccaaaagcctgtatgagaggaaaaagggattcaagaaactgtactggattgaaggcgccggacatgtcggcggatttcgccacaatcctgaggaatacttaaataaaatcaaagactttatcttgaaaatcgagccggccaattagccttgcgattccagtttttcagcggctgccgatctttggcgcgcttccttgattttgccggcgtaggacgttccccaattcatcatttgccggatgatcgggatcagcgtcttgccgaactcggttaaactgtactcgactttcggaggaacctgtttgtaaattgtacggcagacgatgccgtcgcgctcaagctctcgaagctggagggtcagcatccgctgagtcacgccgggaattaagcgccgcagttcattaaagcgttttttatcatcgatcaagtgatacagaatgacgcttttccatttgccgccgatgatttcgatcgttgcttccaccggacatgaataaccgtccggtgcttcgcatgctgccggatgttttttcattttcttctctccttagtataaaaaatgatactatgccacaaaaatgtgcgtactttcttattgctattataatgattagaatgaaattgagaaaggaatataaactatagagaaaaggagagaacataatatgacagagcaatccaagaagcaagagattcttgacgcattccaatttagacatgcgacaaaagaatttgatccggacagaaagatatcagatgaggattttcagttcattttagaagcgggcagactgtcgccaagctcggtcggcctagaaccgtggcaatttgtcgtcgtccaaaataaagagctgcgtgaaaaactgcgtcaagtctcatggggtgcacaggggcagcttccgacagccagccatttcgttttgctgctcggacgcacggctaaggaaatgcgacgtgattccggctatgttgcagatcaattaaagcatgtgaaaaaaatgccggaggacatcattgaaaatatgctgaaagaagacggcgttctggaaagtttccaagacggcgattttcatttgtacgaaagcgacagggcgatgtttgactgggtatcaaagcaaacgtacatcgcgctcgccaacatgatgacggctgccgctttgatcggcattgactcctgcccgattgaaggctttaactacgacaaagtccacgacatccttgaaaaagaaggggtgttggaggatggccgctttgacatctcggtcatggccgctttcggataccgtgtgaaagagccgcgtccgaagacgagacgggcgcttgatcaaatcgtgaaatgggtcgaataagaaaagtgcggttctgcataagcagaccgcactttttatatttagatctggagcttgcgccgcttcctttggtaaaggtacaggccgcttccggatataagcaacagcaggccgagcatcagccaatgataggcgtttgaagcggtgtcaggcaaaaaaccgccgtttgaaccatcggaaggttcatttccgtcatctgctccgccgctgtcatgaccgcctgatccgtctccgccgctgccggcgccgggcgaagcagggggttcaccgccgctgccgccatccggagtgtcatcatcgccggaacccgtcggaagggaaggcgacccggcatcattgtcattcatcacggtatactcgctgaaatggtcgacatagcctgcaacggtacggcctttcgtatagccgtttgttacttttgtgaagctgttgtttttgcggtcgacataatagacgctcaaatgtttatcaggagcatcgacttggaacaacagtccgacaggctctttaaatgtgctgaccgttttaccattctgctgaatgttgaaatcatatacctttgtgaccgcctgtttgatatccttggcgattttaatgctgatttttgtcttttcgcttgccagattaacggctggaagctgcatcgcaatgcgatcgtttttcagggtgatgcttggatcaccggttctttctttgacaaggtcagtctgtgcttttgtcatattcagcatgatgtgttccttttctgtgtcagggaaataggcaatcgcctgatttgcgtttttcgcgtatgtttcgaacggcttttccgcaagcgtccaagagccgtctgcctgacggtcgggaaggaacacttctgtgattctgttctcgatgttcggtgaaacagaatcgtataaggcaagctgctctgtaaaaatgtcgtaatcggtaaagccgagatcgacaccgtttttcgcttctttaaaaacggaatagccgtctccgccgccgcccatgaagttatttgtagcgacacggtaggttttgtccaaatcgagcggaacagcgtcccctttgtcattgactaggttcacatcaaggattcgctcaccttttggcttgctcagtgtaaaggtgaaggatagacccgaaacatgcggaaacgcgcctccgccttcttcgacttggctcaccccgtgctcaagcgcttctttgatttgcgcccccgtcaaatcagcggcataaagggtgttgccgaacggcatgaccgtcagcacatcgccgagtgtgatttcgcctttggcaataccgcttctgattccgccgccgtttgtgatggcgatgtcagctccgccggcttgttttgctttcttcagcatgccgtccgcgataaaattgccgaggttggtttcttttgagcggacatgctcgcgttttccgtccagcgggacatcggcatagcctacttttttctttttcagttcgtcaatatcttctttaaagccgtcaagcacttctttcccaggagggtcttcgtccactttgtcgtcgatcgcgatcaaattgaaccttgattggtccgtttgaacgacgccgttctcatcaaacaccacatcgacccttcccaaaaactgtccgtagtctttcacttgagcgacgattgtcggttcttcgttctccaccactttcaagtgatcgacaagtgtatgcgtatgcccgccgataatcaaatcgatgcccttcactttcttggcaaactccagatcccggttgtagccgaggtgggtgagggcgatgattttgttgaccttttctttttctttcagttccttcaccgttttctctgctgactgataagcgtcatgaaacgcaatgttcggaccggggcttgatgtatatgacgtatcttccgtcgtcaagccgaatacgccgacttgttcgccgtttacatcaagcagaatataaggatagatgccgctttctttcttttttcccgctgctaagactgcaggctctttctgaaagcttcgcagcttcggctcttttgatacatccacattggagctgacgatcggaaaatcgggcttttccagctggtgtctgtttaacgggtcgacggctgtatagtttccgctgagaaagtctgcgagcactttaggccctttatcaaattcatggttgccgaaggtcatggcgtcatagcccatcatgttcatcagtttcaaatcggcgagtccgttccattttgtaaaatacagatcgccggaaaagacgtcgccggcatcgagcagcagattgttttctgtttcactgcggatttctttcactttggcagcgcgccttgccgctccatcaaggtgggcatgcgtgtcgttcgtgtgcatgacggttaatgtccagttttcatcatcaactggaggctctgaaccgtcaaagttcagcttatagacgccatatcctttgttttcggattccctgacaaaatcgatgtcattcgctttttcagcaaacggtttggcaaggagggaagactcgaatgtcacgtcggctcctttaatcggagcgatcgaccagttgttgtcggcggcgggattgaccgttttcttctccataatgtagttcatgagcacctgcctgttttcatcagccgccgcataaacgactttgtcctgagtcagatgcgggaatccgccgcccccggaggcgcggtaattatttgtgacgacaaggaattcctggtcgtcgcggacgggttttccgttgtaagacaactgtttgacgcggttcgcctgcggatttttcaccccgcctgaggcattgtattttgcaggctgtgtgacatcgatctggtaggtcacaccgtcaatgacatcgaaattatacgacctgaaatcggggttgaggagcgcctgttcacccgattttgaaggatcgatctgattgaactgcccggccgacatttcgatccagtccttcacttcgcttcccgtcagtttgacgatatagagcgtattgtcgtacaaatacaaatcgccgatgtttttgatcgcaaggtttcctgctttaatgtttgtataataatcagcaccgttgcgtcctcctgctttgaacggcgcgcccgctgataaaatcggcaggttttcgtattccgttcccttcatgacatcttccgcataccatttttgtgcatctgtgacaatctggattgaaggatcgtcttttacctgcgcgaaaaagctgttaatatcagcttctgtttggccaaccggcgcgcggacgtattcgagcgttttttcgtgcgtatctttaatcgcggaaacgacggtttcgtttcgcgacgtcacatttccggcaatcgcttccgtttttgcgctggcatctttcactttccatttgccgccgtccagttcaagctgcatatcgataattcctaaatggctgccccagttcttcggcatgacgacaggaatgccgttgatcgttcctttttggttgtcgatcacgccgttaccgggatagtcggtgccggggaacagaccgtgctgatgtccggagatgatcgcatctattccttccgtcttgagagccaggtcgtatacggcgttttcggctcccgccgcctgttcgccattttcaattccggagtgggcgatcgcgatgatcacgtcggcgccttcctgtttcatttttggaatcgtttcttttgctgattcggtgatgtcctgcactgtgattttgccgtccaggtgctttttatcccatgttaaaatctgaggcggaacgaagccgatatagccgactttaagctggtgctttcggccgctttcatccgtcagcgtccggtcttcaatatgatatggcgtatatttgttctttccgtccggtgttttaatattggcattgacgatgggaaattcggccccttttatcgtgccgtcaaggaattcaaggccgtagttgaattcgtggtttccgagcgtgccggcgtcatattgcagtttgttcatgacatcaatgatcgggtgtgttttcgttccggagataatcgattcacgttcatgtttgaagatgtattcccctagagggtttccttgaattaagtcgccgttgtcgacaagaatcgtgttaggattccggctccggtacttttcgatcagctgagccgttcgtgccagtccgaattcagccgtttctttgtcggcatagtagtcataatccatcatatgggcgtggatatctgtcgtacccaagatgctgaggctgatcagcgggtgttcgttttgttcttctgcatatgtctgggtgtttggcatgagtaaactgagtatcatcactgaggttagcagaatacggagaatgtttttccttgaaaaccgtcttttctgtattcccaccatttctccacctttcagattagagtaacaatttctattgtaagaactttttgtaaagttttgtagaactttcgttgcgaatattgtaaacactcagaaaatgattccaaagtctgtctctgtctgccgggtgacttaggtactttgtcgcgagggcgtggggatgttttatttagtgtggcaggggtaaatagatttatgtagacagaagcttctgggagggtgatcaatatgagcaaaaaaattgcagttgttctgacagattactttgaggattcggagtataccgagcctgcgaaagcgttcaaagacgccggacaccagcttacggttattgaaaaagaaaaaggcaaaacgctgaaaggcaaacaaggcgaggcgcaagtggaaacagatgcgtccattgacgaagtcagcccggctgattttgacgcattgttgattccgggcggattttcgccggatattcttagagccgaccagcgtttcgtatcgtttgcaaaatcctttatggatgacaaaaaaccggtgtttgcgatctgccacggcccgcagcttttaatcaccgccaaggctctggacggtcgcggtgcgacaggctacacatcgattcaagtcgatttggaaaacgccggggtcaaatttaaggacgaggaagttgtcgtctgccagaaccagcttgtcacaagccggacgcctgacgacatccctgcgtttacacgagaatctttgaagctgctcggctgatgaaaaaagaccggaatagatttccggtctttttttatgtttattttcggagtgcggccagttcctctgcgattgcctgcatttcgctcggactgaaagatttctttttcatcaccatttggtgcaggtattcaaggtcttcaagcttttcattgctgaagtcttcagctttaatgacgccgatgttcagcatgtttaatttctgtgagatctcttcgatcattttgttcagctcggctgttttttgctctgacaagaaggcacatcctttctcactgatttcgtagtctttattgtaacagaattaagcgagaagaaaaggacggctgtcaaaaagcatttggcttaaacagatacgctgttttgcttttcttctttttcggctttgattttggcgaggatctgtttggattcatagacgacaatgcctgtcaaaccgagcaggccgatcaggttcggaattgccatcaggccgttcagcatatcggcaagcgcccagacgaagtcatttttaaagaccgctccgaaaaagacggcgatcacaaagatgatacgatagacgatcgcatatttttcattcagcaggtaggtgaagcatttttctccgtagtacgaccagcccaaaatcgtcgagtaggcgaacagcagcagtccgatcgcgacgattgtcgatcccgcaggaccaagaaagtgtgcgaatgtcatcgatgtcagggcatcggttttttctgtcagatacatatttcccatgacaattgatatccccgtaatcgaacagacaatcaatgtgtcgatgaaaacctgggtcatagagacaagcgcctggcgggccggcatatcggtttttgccgcggctgcggcgatcggcgccgagccgagacctgcttcatttgaaaatacgccccgcgctacgccccagcggatcacggttccgatcgcgcctcctgccacggcttgcccggtaaacgcgtcagagaaaattaaaccgacagcgccggggacaagttcaaagtttgtgacaagaatgatcaatccggcgatgacataaaataaagccatgaccggcacgaacagcgaggtgactctgccgatgcttttaattcccccgagaatgacaagggcggtaaaagtcgtgacaataatcccggttacccaggcaggaacggaaaaagtggagctcatgactccggatacagaatttgactgaaccatattgcctattccaaaagcggcaagcgccccgaatatggcaaataacacgccaagccacttttgcttgaggccgtgttccaaataatacatcggaccgcctgacatttcgccgtttttatctttcacgcggaatctgacagcaagcaccgcttcagcatatttcgtcgccattccgaagaaggcggcgagccacatccaaaatacggcgcccggcccgccggcaataacagctgaggcgacgccgacgatattccctgtgccgaccgtagcggcaagggcggtcatcagcgcctgaaagtgggaaatatcgccttcggaggatttatcctgatgccttgaaaaggcgagctttaaagagtaaggcaaaagtctgacctgcaaaaaagccagcctgaaagtcaaataaatccctgttccaacaatgagaatcaaaagcggaggcccccataaaaaaccgttcattgtatctacaatatgtgaaataaattccataggcgaaatatccccctttaattttgtgtctaactagaatattctgaaagtttgttagatttgtcaatagcattgtcatcttttcttcccaaagttgaaaaaaacagaaaaatctttagtataaaagcaaaagtgttttttctttctgaaaagtggggaaagaatagaggaggctcctgagtgatgatcaaagtgttatttgtctgcctcggcaatatttgccgatctccgatggcagaagctgtatttaacgatatgctcaaaaaaagcggactggaggaccggatcgaagccgattcggctggcacaggaagctggcatgtcggcaaaccgcctcatgaaggcacaaggtcgctgctgtctgaaaaaaagataagctgcgaaggcctgtatgcaaggcagattactgacaaggacccggaagcgttcgattatatcatcgcaatggatgccgaaaatgcaggccatgtgagaagccttgccggctacgggagcaaagccgtcatccggaggctgctcgactatgtcgaagactgcgagacggcagatgttcctgatccatactacaccgggaactttgaagaggtgtacgaactcgtcgcgaaagggtgccgcgaattgctgaaggacattcgaaaagaacacaatctataaaaacgaagggagagattttttatgaaaaacgaccgcgttttcatcagaaatatcctcctcggcgcttcggtcggggcggttatgtcactgctgcacaaaccgactagggaagcgtgcggtgcaaagcttaccgcgtgcaaaaacaaagtccgcctttaccgtgcaaatcccggcatgctcaccgaatgcgtgaaagaaaaaatggacgaagccaaaaagctgacggcttccatatcggatgatttgagcttcttaaatcaacagataaaagagctgaaggaaacgacgccaaaagtgatcggcctgatcgaggaaacgagggatcacttcacagccaaatccaaaggacgtacggagccggaaaaagaatgagttttttgaaagagctgggctggcgttttttccttcatgaaggaccgagcaaatcggcggaacttgcctacttttttctattgtctctgtttccgtttatgattttcctattgacattgatcggctacctgcctgtcaaaacgggcgatgtcatcgggctgatcgaacagtatgccccagaagacacgatgtccgtcattgaagagaccctgaataccggaaacaggggcctgctttctttcgggatcattgcggcgctctggtctgcatcaaacggattgaacgcgattgtcagggcctttaaccatgcttatgaagtagaggaaaaccgctcttttatcatggttcggctgacatcgctccttttgaccgccgcgatggttttcacaatattggtcgcgcttcttctgcctgtattcgggagggccatcggccattttatcgccaatctggacggtacgccggagatgtttctgacggcatggtcagcgcttcgctggggaatcagcccgcttgtgctgctgatcgtctttacggctttgtacttttttgctccgaataaacggctgtcatttaaattcgtgcttccgggagctgttgcagcgaccgccggctggatcctcgtcagcgtcctgttctcatactatgtcagcgaatttgcaaactacagtgcgacatacggaagcctcggcggcatcatcgtcctgatgatctggttttatttaagcggaatgatgattattcttggaggggaaatcaatgcccttttacataagcgtaaaatcattcctgaagaaaatccgcggaattgagcaatctataatagaacaattcatgagttcaaaagcggagggatcatcatggcaaaacacacgaaaaaaggcggcagccataataaacaaaattcaaagcaaagtccgaagaacaaaacgagcggaagcgccaacggacaaaacggatatcattaaaaattgccttaaaaggccggctccagcagccggccttttttacattggcgccgcctcagattgttcgagagcgccgtttttcttcgttttgccaaagagcaccccgatccagatcaacaccatcacgcatgtaatcaaataaaacaggttgctgttatggaatatctgcatataccacccgcctgcaaccggaccgaaaatgcttccgaagctgaatgtaattccgcacatcaagttcccggccgggagaaggcgttttggaagcaggtcggccataaaactgatgccgagtgaaaaagttgatcccacagccattccggctatgaaaaaacatgccgcaagcagaagaacggattcggaaaagcccgcagcaaagaagcagcctgccccgacagccaatatgacaaggagtacatttcgccttccgtacttgtcgctcaacacgccgagcggatactgaaagacgatgcttccgatcgcaaaagccggaagaatgatcgatacgccttcgatggaaatgcccgaccggagcgcatagacgggaaaattgccgttcagggcggtttccaaaaagccgtagccgaatgtcggcaaaaacgcgacccacccaagcaggaaggcttgagcgaaacgcttcaagctgttatcgctgcggctttcagagccgcttttctcagggaaatcgttttgcaggcaaaaaataaacagccatgccagcaggctgaacgcacctgagacgataaacggcaatgatggggcgatgttgacaagcggcgttaaaaaaggcccggctgcaaatcccaaaccaaacgaaaggccgtacaaagagatattgcggccgcgttttttttcagacgataatgtggtcacccaagtttgcgttgaaaagtgcagcatatgatccccgattccgatcaagagccgcaaaaagaaccaaacgataaacgactgaataaaaacaaaggcgaacaaactcgcgcacaccatcaccccgccgatgacaatcagcggtttaaaaccgagcctgcgaagcggcgcttccatgaaaggcgaagcgatcaggacgccgatgtagaggcctgtcgcatgaagcccgttcagtgcagccgaatggccttcctgttcgaaaataacagagatgaccggaaggagcatcccttgcgaaaaacctgatatactgacaatcaaaacgagaatgaaaaagtgaaatctagtcatcggccgattctccttatccgtaatccttctttgatcgtacaactttcagaagttttcaggcaaggcgatttttctttttctttcataagaggtgtgattcatggaaatcgtgtggaatcagaacggctttgaggctgatctggaatatgggaagcttaaaatatcaagcaatgaagaagcgggattcaggccttatcaattgctggccgcttcgattgcggcatgcagcggaaccgttcttcataaaattttggaaaagaaaaggatacagctgaaagatatgatcatcgaaacaaaagaagaacgcatttccgaagaggctggccgcatcaaaagcatccatcttcacttcatattgaagggagaaaacctcggtacagaacaaatcaaaaaggcgctgagaatagcgctgaaaaactgcgccatggtgaggtctgttgaaaacagcatagacatcaccgaaacatttgagattcgctgatgtttaaaaacatgcgccgctgcggaatagatcagtatgccgtatataaagcgaaaagttcgcacaaaaataacctacaccaaaaaagaaaagaggaatgaaaaatgagccgttttttcttttggatgatggctgcaggtgttccactttctgtcgcagggagccttctgcattggccgcaggttttattgttcatcatatactgcctgacgatcatcgcgcttgcaagctatatgggaagagccaccgaaagccttgcgatcattgcgggaccgaggatcggaggccttttaaatgcgacgttcggaaacgccgttgagctgatcatttcgattttcgcgttgcgggaaggactgatcggaattgtgctcgcatcgctgacaggatctgtcttgggcaaccttctcctggtcgccgggctttcgtttttcatcgggggcctgaaatataagcgccaggaattcaacgtgtatgatgcgagacacaattcaggtctgctcatgttcgcggtgattgtcgctttcgttatccctgaagtgttttcagctgaaatgacagagccgaggaagctgtcgatgagcgtcggcatcagcatcatcatgattttgctttacctggctgcactttatttcaagcttgtcagccaccgcggggtttaccagacgaatcaaaatgagcaggaagaatcgcatgaagagccggaatggtcgggaaagcgcgcaacattgatcttatttttggcaactgttgccgtcgcctacatttccgagcacctcgtccatacgtttgatacggtggccgaacaattcggctggtcggagcttttcatcggggtcatcattgtcgcgatcgtcggaaacgcggcagagcatgcttccgccgtcattatggcctataaggacaaaatggatgtcgcggttgaaattgcgatcggatcaacgcttcagatcgcgatgtttgtcgcccctgttcttgtcatcagctctttgttttttccaacgagcatgccgctcgtctttaccttgccggagctggtcgccatggcttccgccgtccttttgatgatcatcatttccaacgacggggacacgaactggtttgaaggcgcgacattgctggccgcttatatcatcatgggaatcggttttttccttctttaaaaaaatcgggataaacagagagcatccggaaaacaataaggaaaaagaaacagaaagagtgatagtatgaaaaagcttttgtgttttacgctgactgcgtttttatcctttagttttttcgctgtacaggaagctgacgcagccaagccgatcaagattccaagctctgtcacgaatatttccaaagagaacacataccctaacgcctctcaggatcagccgaggctgcagccgagcgaattagccgaagagctgctgaaaacaaccgatattgcgattgaaaatccgcatctgattaaaatgctgaatgagtcaagcatttccggcacaccgctggcaatcggctatcgggcgacgatttatttgggcagatgggcgctaggttacacctcgaatgaaaccgttgcgaactgggaataccgcaaaatcaacacaaaccgctttgacaaccggggcgggaaagcacctgcagaactcacgtattcccaggaacagacgagcaaaatcaaaggcggcttaacagcgaaagttccaaaggcggaagatgtcaaaaatatgatgatgctcaaagccatggaaaaaacaaagctgccgctcgcctttgaaacagtggtcggctccggtacaaaacgcgatcagatttataaagtgcagccgaaaaaactgggaaatttacacgcctatgcacctgccgtcaatgaaaaaggaaaagtcacctacggcgaagtgtacatcgtattaaaaggcaacaaaagaaagctagtcgtcaaaaatatcacctcgcaaggaatcggcgcttggattcctgtacaggatcacctgacattcggctttcagctcagccatcagccgaaataaaaaagcaagcctttgcggcttgcttttttcatactcttgctgttctggaagtaaaatcaacatcttgataatagctgtttttgacgagcacattcggtccgaggcaccggacgtgcgggcagtggcagttgagttctttggcaagctctgtttttctccacttcgcgtaggcgcttggcaggctgtctgtctgaatgttgccgagcggcggagtatctccgaaatcggtcacgatgatattgccgtcaaaaatattgacgttcaggcgcgatctgccgtcagggtcgtttctgacggtgacgtttttcgcttcgcgcagccgctgtaagagggcgtgatcttcaggatcagggctgcacgcgtaaaacggcagagtgccgaacagcatccacgtattttcgtcgcgaatgtcaagaaggcggtggatcgcttttctcatgtcttttaagcttaaagattcaagtgcgcttgcaaagtcgctcggatacatcggatggacctcatggcgctggcatttcatgtcttcgacaatttgccggtgaatatgctcgatatgaggaagcgtccgtttgttgagcatcgtctcggcggagaccatgaccccttcatcaacaagcgtccggctgttttcgatcattttttcgaaatagcgcgcccgctgtgcaaacgtcggctttttatccatcatagcgaagccgatttctgcaaagtcttcgaccgttccccagttgtgggaaatatgaagcacatccaggtaggggatgatcagctcgtagcggccgatatcgagcgtcaagtttgagttgatctgcgtccgcacgccgcgttcatgagcgtattttaataaaggaacgacatattcctttacagattttaatgagagcatcggctcgccgcccgtaatgcttaaagaacgaaggcggggaatctcatcaagccgtttcaacagaaggctgactggcagcgcgtccgggtccttcgtctggagcgtatacccgacggcgcagtgctcgcagcgcatattgcaaagagtcgtcgtcgtaaattcaacgttcgtcagctgtatatctccaaattggtcaacgtccatgtaggcttcccacggatcatattccggggtgatcggacgaacctgcattttttctgtcatgacatatctaactcctttatgataggacatactaatatagcccaactattcattttagacctgatccttgaggcatgcaagtcatggatgattgaaaaaaggccgtttataggctacgataaaggaacaaaaggaggagaatcatgggtaacgcagtacatgacaaagaacagcaagtcaattatttgaaaaacagattggatatgtttatgtcagtcatcgattctttagacccggaatcgaccgaccttgaagatattgacagactgatcagcatgatcgacgatttggaagccaaatacgagcgctttaaaaaagactggaaataaaaccgcgcattctctgccgcggtttttttgttttccaagtgttgcttggtatgaaatgctcagcccttctgcacaataagaaaaaataaaactgggagcgagaagatgatgaaacgaatctgtgccatatgctgcggattcctgctgacgctgggcttcagcggcaatgctgaagcgatttccaacaaggcgatccattggggtttttcaaaaagcaaaaaccatcagccggcagatgcgggtcaagagctgaacaaccttttacagcagtacgacgccttttatttgggcaacacaaaggaaaaaacgatctatctgacctttgataacggctatgaaaacggctacacccctcaggtgctcgatgttctgaaaaaacaaaacgtcaaagcggccttttttgtgacgggccattttgtcaaagatcagccggagctgatcaagcgaatggccgaggaggggcatatcatcgggaatcattcatatcaccatccggatctgacgacgaaaacaagccgcgtcattcaagaggaattggaatcggtcgatgaggaggtttacaaaatcacaggcgaaaaaaacaacctctacctgagaccgcctcggggcattttcagcgagcgggtgctcgaagaaacgaaaaagctcggctatcaaacggtattctggtctgttgcttttgtcgattggaaaatcaatgcccaaaaagggtggcgctatgcgtacgacaatatgatgaaacaggctcaccccggcgccatctatctgcttcacaccgtctcgagagacaatgccgaagcgcttgatcaggcgatcaccgacttgaaaaaagaaggttatacatttaaaagcctcgatgacctgatgtttgaaaaatctatgatgcttgagaccctttgaaagaacaatgccccggccgctttgccggggttttgctttggctgaaaaaattgatgcttcaggctctttttatttcccctagtcaattctatagaataaaaatccattttatatacatatattactagatttaaaagaaaataggtatatcattgatagtgaagggggaattaccatgtcaaaatcagtaaaatcagtcacatcacctaaaaaatttattacaggaaaacgactgctggagaacttgaacgactacattgaagattttggcgacaacgcatatatcatttgcgatgaattcattttggaacgcgctcaaaaagaagcggggaattcgattcagaaagccggcaatcaagccgtttttgaaaaattcaattacgaatgcacacaggaagaaatcgatcgcaaccgggagcttgcacgcaatgcaggcgctaatatcatcgttgggatcggaggcggtaaaacgcttgataccgcaaaagccaccgcttattacgagaagctgccggttgtgattttcccgacaattgcttctacggatgctccatgtacggcccttgccgtcatttataaacacgacggatcgtttgaccgctatctgtttttgccgacgaacccagatgtcgttcttgcggactctgagattttggcatccgcgccgccgcgctttttcgcagccggtatcggtgacgccttggcgacgtattttgaagcgcgcgcctgctttaaagcaaacggcgataacctcgtgctgatgaagccttcaacaactggattgggacttgcccgtctttgctatgatacgctgttggaaaacggtgtaaaagcgatgcaggcggttaagcacggcgtttccacacgagcggtcgaagatacaatcgaggcgaccatctatttaagcggcgtcggtgccgaatcaggcggtcttgccgccgcacacgcgatccacaacggaatgacagccgttccttctctgcacagggctcagcacggcgaaaaagtcacgttcggccttttggcgcagcttgttcttgaaaacgcgccggccgaagaattggagaccgttattgactttatcaaaggcgtcggtcttccgttgacattaaaagacctcggagtcgacgaatttgtcgaagaagaatggcgccaagtcgctcaaagcgcttgcgcggaaggcgacacaatgggcaacatgccgttcccagtcacccctgacgacgtctacaatgcgatcgtcgccgccaacgcgattgcagaatcttatcacgattaatagacgaaaagccgtttccgtgaaggagcggctttctgctttgggttagtatattagtttgtgaatcggcggtctgtccgtgcttttgaatataaattgtgtggtacgtttcccagagtaaaattatgaatttcttttatagcagtttcccaaaaacgagctgtttgactcgtgtgacagccgttcatttcaccactttaatcttcaacctcggctcttcttcaattccggatgcaaatgcatcctcatttcccggagccgtaaaagtgacgctgtacgtttcctgtgaatgcggcgacagttccagctcttccggctgaaagtcaaattcatttattatatcaggggtgagctggacgcgttcggtctttttcccgtagttgttgactttcacctcacagtccatgcttcctgcttccatatcgccctgatagctgcaagcgcttccccttttcatatattccacggcgctatcgccttgtgcattccatttttgaaagaacatcagctgttctgtgaccagcgggtaaaatactgaaataccgatgataaacaaaaacagcttaaagcggatccacggtactccataataatggcgccacgccataatgaagccggcgatgatcataaacatgcagatcagaaccactaaattccggatgggcagttttaaaaagcccgaaagcgcgtctgctacagacgcgccttgatgattctcggcgctgatcaacaggccgataacaatcatgatgatgccggcaagccctgtatgtaccttcatttctttccctcctcagttgtagaaatagtcgaacagagaggaaaaaggtttccggttttacttgaaaatgtcaaaccatcctttatgccggaaccagaagatcatgccggcgacaacggctgccattattccgaggatgaaaaaatagccgtagcgccaatgcagttcaggcatgttgtcaaagttcatgccgtacactccggcaatgaaggtgagcggaataaaaatcgttgagacgatcgtcagcgtcatcataatggcgttcatccggttggagttgagcgtctggtagctgtccctcaaatcggctgtcatgtcacggttgttttcgacgatttcggccagcttcaagagatggtcgtaaatgtcgctgtaatacgcttttcgttcgcggttttcttttgaaatttcaatgtttaaaatccggtaaagcaaatcccgcatcggaatgattgttttcctcagctttaaaaggtcgccacggatatcaaacacctcgttcatcagcgttccatacgttttcctgctgtcgctttcggcaatttcattgaggcggtcttctattttgtaaagaatcgggaaatattcgtccacaagcgtatccatgaccatataggcgatgtggcccggtccgtttttccacaactcgctgttttccgaaagctgtcttcttactttttcaatgccgtctgagtgatgaaaatgaaatgtaacgatgaaatcctttccaacgaataaatcaacttcttcagacgccaaagtcttttgattcaacgcatgtatgacgaaaaaaagataatcttcgtattgatcgagcttgggacgctgcaagcgatgtacgcagtcttcgaccgataaagggtgaaagtgaaaatggcttttgagcaaggagacttcttcttccgaaggctgatcgaaatcggtccaaaaccactcaatatcttgatctgtcagcctttctgctttgttgtcggataaaagccgtccgtcctttgtcatcgcaaaatgtttaatcatcgatacccctccgcttacataggatgctgcgctgtgctgtgattcattcgatgaaaaataaaatgttgttcttttttaagagaatttgaaacatggtatactgtggacaaagaagaaaaagggatgggaagcgatgtggaaggaaactgtaagcgtaacaccgccttatcattttgaccgcgtgttggacaggctttcgcttgatccgctcaatgcggtcaacctcgacaaaagggaggtcaagctgccgctccgcaatcaaaacaaagagcctcgggttgtcgctgtgcaggcgacgggaactgctgaagccccggcgtttgccgtcagcggaatagacgatcgagatgacatgataaaagaagtgaaacggatcttcagatgggaagaaagtcttcagcctgtactggatcacttttcacaatcaagcctatcatcgatttttgaggagcatgccggaacgccgctggtgctcgattttcatttgtatcattgcctgatgaaatgcattatccaccagcagctgaacctgtcttttgcttatacgctcacggagcggttcgttcacacttttggagagcaaaaggacggggtctggttttatccgcttcccgaaacgattgcacagcttgactacaacgacctgcgcgaacttcaattcagcatgcgaaaggctgaatatgtcatcgatacatcaaggatgatcgcagacggccgtttagatcttgatgagcttgatcaattatcagatgaagatattatggaaaagctggtgaaaatcagaggaatcggcccgtggaccgtccaaaacgttctgctgttcggactcggccgtcccaatctgtttccggcagccgatatcggcatccaaaatgccatcaaacgccattttggcttaaacgataaaccgacaaaagaacaaatgcttgaaatgagcaaagaatggcacccttatttaagctatgcttccttgtatttatggaggagcatcgagtagaaatggagagaacaccagtgaaacgtgacaaaaaaggatcatcagcagaattaaaagtcggacagcaatttccgctgacgatcaagcgcctcggcatcaatggcgaaggcgtcggctacttcaagaaaaaagtcgtcttcgtccccggcgcgctgccgggagaagaagtcgtcgtcgaggcgacaaaggtacatccgaaattttccgaagggcgggtcaaaaaggtgcgcaaacgttcagagcaccgcgtcaagccgccctgcatcatctatgagcaatgcgggggctgccagctccagcatctggcttatgaagagcagctgaaaggaaaacgggacatcgtcattcaatcgctcgaacggcacacccgttttgacatcggcaaaatggacatcaggccgacgatcggcatggaaaacccgtggcactatcggaataaaagccagtttcagctcgggctttcgaaaaacggaaagatggtggccgggctgtacggccttgactcgcaccgtcttgtcccgattacggaatgcattgttcagcatccggcgacgaacaaaacgacgcaaaccgtcaagcaggttcttgaagacttcggcatttccgtctacaacgaacggaagcgcacgggcgatgtccgcacgatcgtgacgagggtcggcttcgagacgggggaagtgcaggttgtccttgtcacgtcaaaagaagacctgccgcgcaaggagctcattgcagaagaaatcaagaagcgtctgcctgaagtgacatctgtgattcaaaacgtcaacaaagccaaaacatcggttgtcttcggcgatgatacaaggctcttagccggcaatatggtcattcaggaatttctcggagaggtttcatttgagctgagcgcccgcgctttttttcagctcaatccgatccagacagtcaagctgtatgacgaagtgaaaaaagcggcaaaactgaccgggcgcgaaaaagtcgtcgacgcatattgcggcgtcggcacgatcggaatgtggatcgccgacggggcaaaagaaatccgcggcatggacgtcatcaaagaatcgattgatgacgccaaccaaaacgccaaaaagcacggaatcgaaaatgcgcgctatgtaacaggaacggccgagcactggctgccgaaatggacaaaagaaggcttcaggcccgacgtcgtcatcgtcgatccgccaagaacaggctgtgaccgcacgttccttgatacgatcaggcaggttaagccgaagcggttcgtttatgtctcatgcaatccgtcaacacttgcgaaagatttgcagtacttggcgaaggattaccatgtagaatacattcagcctgtcgatatgtttccgcagacggcgcacgtcgaatcggtcgtatcgctgaagctgaaataaaacgcctttttaaaggcgttttttagcggaaacaaaagggggatacatgatgaaaagactttgcatcatcccgtgcggggcgaaaaaaatctgggatgttgatccggacatcggcccgtccgccgcaaaggatgtctatctaagcccatttcaccgggcgtgccgcgcatatgcgcagacattttttacggattgggtgattctttcagcaaaacacggttttttaaaacctgaagatatcgttcctgaaaactatgacgtcacatttgggatgcgccacccagagattatgccggatggcgggctgaaggctcaaggtgaacggaaaaacctgatggattgcgatgaaatcgtcatgctcggcggaaaaaaatacaggcctgtactgaggaacgtgtttggcagcggacagcagatcatatacccgctggcgggataccggggaatcggctatatgctgcaggcgctgaagcgggctgtcgatgaaggccgggaacttggtgaacatgaaaaaaatgagtttttttaaaatcgctggcagggccctcaaaataaaggacagggcatcatccgagagaccggaagatgtttgtttggcgattgggatatcgggaggcaaaatgaaatattcatttttgtctcttttttttatgtgatttttgtaacgaaaagaaggtcagcggtactaataagtgaatggaaaaattaaagaaacagcggaagatttaacacaggaagcattttatcaggctgtgaaaggctggctcccacacatttttgggaaagccgacaatcaaaacatgggtgtttgcgattgctaaaaaaacactttcgttcaggagcgtcgaaagccggggcaaacataatgattcaccaagttaaggcagcttgcttatctccggaagaacacttcctgaaaaccgtgaaagagcggcggcttctcgaggaaatcaaccggcttgatgagaatttacaggagattgtcagcctccgcatctacgaaaatcggcatgctcacaggcaaaaccgaaaactatgccagggtggggtttcacagggcgaaggtcaagcttcagcaagaaatggaggggtatgatgaaggataaggaacgcagtatattcgaagatttgcttcctttataccatgaggggctgttaagcaaagagacggcagaatggattgaggaagcggccgaaaacgatgaggagcttcaaaagcttttgaagatgacggaggccgagcttccgaaagaacagattgaatcgtctgttcatgaaagtcaaatgtttaaaagaatcaatcggaagctctccttgtaccagctgatgtttatggcgatttcgttttttctcgcgattcgcacatccctgttaaatgagagcttcggctttattctgtggtacgccgtgcttgggtttgcggggtatctgttttaccgggatatgaaactcgtgatgctcctctcctttgcgccgattttcgtttgggggatgggggatattttggccggatgggacgcagccggcggtacaggggttgtggagcacctgctgtatgccgtctttggcgctttcgtgctcgctgttattcactgttttttcgccgcggttgggatgatgatcggctggctgttcttaaagctgaaggaaagaagttgatatgatgaaaaagaaagtcttgtatagcgtgttgattgtgctgctcgtttcctttgtgcttgccgcttacaacgccttcaacggaaatcccgtaagcaagaagctgtctcaaacggcgcttgagcattatttgactgaccgctatcctgaaaaagacttgcggatcgacagcggcatctataatttcaagttcacggaatatgtatttgaagtcactgacaccggtgatccaaagcgcaaagatccctatctgcttactttgagagggtttgttcaacctgaagtatacacggacggaatctatgaagagaacctcaatgaaccgctgatggagcggcttggagaagaagcaggaaaagaaatcaaagcgcttttatcaaaaagcatagaccaactgaaagacgttgacgtgcatgtggaagtattaaaaggaaagctgaaaaatgacgcaaaatgggagaaaagcatccgcttagacaagccgatgcagattcatattttacttgatgccgaaaatgccggccgaaaagaagtatacaatacggcgcaaaagattcagcgcctgttgaatgaagaagggtacgactacgaaagcgtgacgattaatgccaacatttttgatggggaagatattaaagacgaggagatcggctgtcttaaatacagcacctcctttgaaaaaaatacggaaatcaagctgaaggatgttgaagagctaaatgattaacgatccatccttcagtttgaaggatgatatcatacatgcaagccgccgcagaaggcggcggttatctgtttaatataagtgtctttagcgactttttgaaaacggccgccagccaatgcgccagacgagaagtatccgtataaagatgacagaaaagcgaaggcctgtgaatctgcatctccctttttcatcaggtttttgtcctgcatcgtccgaaagtagtctgttaaataacaaaggagctcctccatatgctttaacagagaaccgaaaagatcagtcatccttccgccgtcttgaacagcgataaggtagagcggcttgtttttttccatatgaagcaaatacgattctgcaatcaatgttaagtctttctccaggttccaagtgatatcgttttcaaatacgcgctgaaaggctggtatataagaaaattgttgaacggccgcttccaaaagtccaagcttagttttgaagtggcggtagaccgtcatctcgctgacgcctgaatgaagcgcgatatcctttattgtcaccgacttgaatccgtatttttgcattaagtctaaagcagcagatatgatccgttcgttcgtctcttgcaaaggtgtttacccccattttatgatagttagtagtaactaacatcagtctaatcaggcgctcaattgatgtcaacctgtttcaaaaaggataaaaaggagttatgatcatgaaaaatattttaatcgtcaattttccggcggaaggtcatgtcaatcctacattagggatcaccaaagcatttgctgacagaggcgacaatgtgcactatctttcaacagaaaagtataaagacaggctggagggcgtcggagctaccgttcatttatacaaagatctggtgagaaacgcgcatattgatccgaattcaccgtccggccttcttgaatttttaaaaattcatctcaaaacctcgctgtatattctagacattgtaaaagagctgtccaaaagcatttcgttcgatgtcgtgtattatgacacattcggtgcgggtgaattggtcagggattatttgaacattccgggaatcgcttcgtcggcttcatttctcttcggacaagaacatatgaagattctgccgttgcatccggattcaggcgcggagctgcacttggacaaagaatgtgaggacctgcttacggaactgaaagaaaagtacggcgtctcgcctaggcatacaggacagtttatgagcaatcaggcggagctgaccgttgtgtatacaagccggtattttcagcctgacagcggccgttttggggatgatgtgctgtttatcggcccgcgttttccaaagcgcctggacaagaccgattttccggtagaatcgttgaagaatgagaaagtcatttatatttcaatgggaaccgtacttggcaaaactgcggattttttcaatatgtgcattgatgctttccgtgatttcgacggcaaggttgtcatcgccgctggcgaaaaatcggactacgcggaaattaaagaagtgccggagcattttatcatcgccccgtatgtgccgcaattagaggtgcttaaagaggccgatgtgttcatcacgcacggcggcatgaacagcgtcaatgaaggcatccattaccgtgtcccgatggtcgtgcttccgcatgataaagatcagccgatgatcgcccagcgcttgaaagagctgaatgcgggatatcctctgtttgcagaagaagtgaatgctgaaagattgagagatgcagcagaacaagtgctcactgacggaaaatatcaggaaggtattcaaaaaattgatgaaagcttcagcaactgcatggacattaaagatgcattggcgcgtattgatgaatatacggcgcggaaaaagtcgctgcagccataacagaaagccgctactaagcggctttttttatgcataaacaccgcaaaaaagaaaaaaatagaatgaatcatagatcagaaaggatgttgcatgatgcgcaaactgtgcgtttgcctgcttctcgtcattccgctgtcatgtacggctgtcatgccctctgcctacggggaaacacgcgtttatcaagagttgacggacaagcagaaaaatgaactggcttctttgcaaaaggacattatggaaaagaaaaaacagctgatcaataagtatgtggagtacggaatacttgatcaggaaaggggaaaggaaatcaagtctcatattgaaaagcgctatgaaaaagagcgggaagacggatttttgccaaagtggaagcaccataaagaaaagtttcgcccgcatcacattcattaaactgaaaaagacggcgcctcattttcttcgtgacaaaagtgtaaagacaggtgtaaactaatactcatgtaaactgctaagagagtaaaagaggtgttgtgagtatgaagaaccgtcctgtttcagagcgcagactgcttggcatcgcaggcctcggctggctttttgatgccatggacgttggtatattatcgtttattatcgccgctttgcacgcggaatggaagttgacgccgcaggaaatgagctggatcggcagcgtcaactcaatcggcatggctgtcggggcatttgtctttggccttttggctgaccgcgtcggaagaaaatatgtttttattattacgctgctgtttttctcgatcggcagcgggttgtccgctttaacgacgacattgtgggcatttttagtgctgcgctttttcgtcggaatggggctcgggggagagcttccagtcgcatctacgctcgtatctgaaaccgttgcgcctgatcggaggggaagagtcgtcgtcctgctcgaaagtttctgggcattcggctggctggctgcagcgctcatttcgtattttattattccggcctacggctggcagattgctttattgataactgcgataccggctttttacgccttatatttgcggattgccctgccggattctccgaaatatgagaagcttgcgcaggaaaggaagccgaccatcatggaaaatgtgaaaagcgtctggtcccgcaaatatgcccggcctacggccatgctgtggatcgtctggttttgcgtcgtcttttcctactatggcatgtttctttggctgccgagcgtcatggtgatgaaaggattcagcatgatcaagagctttgagtacgtcctgattatgacgctggctcagctgcccggctatttctccgcggcatggctgattgaaaaagccggtcggaaaatggtgcttaccgtctacttgctggggacggctgtcagcgcctacttcttcggatcggctgaatcgctggcgcttttgcttgtgtcaggcatgtttttatcatttttcaaccttggtgcgtggggtgcgctttacgcttataccccggaacaatacccgacgtcaatcagggggaccggcgcaggaatggcagccggctttggccgaatcggcggcatcctgggcccgcttcttgtcggctatctcgtcgcccggggaacagagatttcaatgatctttttcatcttctgcatcgccgttgttgcggccgtcgcagccatcatctttttggggaccgagacgaagcagaaagagcttgcctaatgtctgaattctgcgtcataatagacggacgcgaaaatttggaaagagttgattgaattgaaaaagaaagccattatgaaaacattgagattgacagtatgggtttagaagggggaagaacggcccggctgcaaggaacgcgcaattgccacctgaatacgtagagaaggcgcttgtagcgccttctcttttttatatatgcaggatatataggtggtttgcactattgatgtccatggccgaagagaatagaatcatattaagaaccaatatcgccgggattgttactggtaaggcaggcaagacctaaaatgtgctaaaggaaccgcagcccttagtgtgcttttttgcgcctatcggctgatgctttcgcatgttttaggtctttttttgtttctttcgccagggggctttagacgtaatgacacatttttcattttgatcgtcttctgttgatttgataggatagaaaaattggaggaggtaggtgcgggtgcagcataaagagattgcaagagaactcttgcccctcattggaggcgcggagaatatcatcagcatcagccattgtacgacaaggctgcgcttcaatgtcagggatgaagaaaaaatcgatatagctgctattgaaaagatggagtctgtgcaggggacttttttcagatacggtttgttccagatcattttcggtacaggtgtggtcaataaaatttataaggaaatgatccaatacagcgatccggctccttttgaagaagcccgtcgggaggcgcggccgaacatgaacgtattgacgcgatttgccaaaacgctgtcagacatctttgtgccgatcattcctgcaatcgttgcgagcggattgctcatgggtctcattagtgtgcttaaagaattcagcctcggcgcttatggcggcccgctgatgaaaatgctcgacattttttcaagctcagcgtttgtcattttgcctgtgctgatcgggttcagtgcggctaaacagtttggagccaatccatttttaggcgccgtcatcggcggtattttgacccatcctgatttgctcgatccttcaatgctcggcagccaaaagccggaatccatcgaagtattcggccttgaagtccctttgatcggataccaggggacagtcattccgattctcttatccgtctacatgatgagcaaaatcgaaaaattcttgaaaagaatcgtccccagttctttagatttgatcgttgccccgtttattacagtcatggcttccgggtttgccgcgctgtttatcatgggcccgctctcactgatgatcgcccatttcataagcgactgtctcgggtttgtttatcattttgcgggggcgtgcgccggatttttatttggcgggctttacgccttactcgttttgagcggccttcaccacagtttttatgtgattgaagcgtcgctgctcgcagatcccgaatacggggtcaattttctgcttccaatatggtcgatggccaatgtcgcgcagggaggagcgggactcgccgtatttttgaaaacaaagaatgccggcatcagaaagattgcgattccggcttctctcacggcctttttgggaatcgtcgaaccggtcatgtttggcgtcaacctgaaactcgtcaggccgtttatcggcgcatcgatcggaggcgcactcggaggtgcatacgccgtcttcacacacgtggcggcaaattcttacggattgtccggcatcccgatgatttcaattattctccctcttggcaccgccaatctcattcattatttaatcgcttttgcgattgcggtgatttcagcattcattgcgactttgtgtcttggctttaaagatgaaaaagaataattccgttttcattcattaaaacaggatgaaaggaaggcagctatgaaagtaaaaaaaatcttaaacaacaatgcgctcgtcgtaaaggatcgcggcgaggaaaagatcgtattagggtccggaatcgcatttcaaaaaaagaagaatgatattgtcgacagatctaaaattgaaaaaatattcgtgatgaaagattcatcagaataccgccaattcgaggagatcttaaaaacattgccggaagatcatattcaggtggcggaggatattatttcttatgcggaaaaagagctcgggatcaaaatcaatgagcgaatccatgtcgccttttcagatcatttatccttcgcgatagaacggttaagcaagggaatggtcattaaaaatccgctgcttcaagaagtcaaagtcctctacacgaaagaatttcaaatcggccgctgggcaaaggctctcattaaagaaaagctgaagatcgatatccccgaggatgaagtcgccaatattgcgctgcatatccacacagccaaaacaaacgcgggagatatgacaaaaacgctcgatctcacaacgatgatcaaggatattatcgagatcatcgaaaacaaactcaacattaaaataaaggatgagacgatttcgtatgagcggcttgtcaaccatctccgtttcgccattcagcatatcgagtcgggagagacattttacgaaatggatggtgagatgatcagcctcattaaaaagaagtttggacaagcgtttatgtgcgcagaagaaatcggggcatttgtgaagcgggagtatggctttgaatttccggaaaaagagctgtgctacattaccatgcatattcagagattttatcagcggtctgctgtcgtgtaaagatgcctgcgtttaagacaaaacggagccctgttaacgggctccgtttttgtttaaagcttcaacttccgttaaaaccgatttatcgattagaaatcctttcactttgacgtgcaaagggattaacgggtgcctgcggatggcggcgacgcttttttgtacaccttcggccacgttttcgctcggtgacagccattcatcaatgctgccttgcgtaaattccggactgcagttttggaaaaggtactctaaagtttgcattctatcttttaaatctttgtctctatttaaaaggtcagaaatatcttcatctgccgatggttcgtatttgtcgcggacaatccagatttcttccgctttgttccggtggacaagggtgatgatatccctcatgaaatcaccgtagggctgtgaaatatcagggaagacgctttttaaaacgagggcgtcctccggctgaatatttgctgcccggcagatggtctgttcaagctgtttctccattccgataatcatgagtatttttttgttttcttccatgacatttcacctcattcatttatcgtgtttgtccagttcttccattttccctccggattaatagatgccagatgaatccatccgttctccgccttttgccggaagctgtgatcgcggtcaaggagccgttcgatatcatcatccggcgcttcaatcacgatcagcagcctgagaggcgcatgatagatttcgtcatctgaccgcatgacggactgccatgggagaccggccaaaagatcgcttgcatttccttgcataacgccgagaccggcagtgacggtttgagttgctttatttccgcttccataataatgcggtgcaacggttgacgcgtaatactgcagattgatccattgggccactgttccaggccctgaaatgatgccgctaaggatggagccgtcctcgtcattccgccagtcatagctgtgcagaaaagcccttccctcaaggtcggccccccgtgtaagccggcgtgtgccgatgatgaatgaggcatttcgggccagcccccattcgggacggatttcgctccaatcttcggcgaagcgctcaacttcattccgcggattttgatagccgagctgcggcagctcttctaagcgttcggctccgacagtacggctcacatcgggaagcacagagttgatgcggtcaaacgcttgttgagctttagccggcagctcaggtacatagagccagtgcagttcatccaaagttgtaatgtgctctgcggcagcgaataccgtatcatccggaataaaaatgccgtcggagcgaagcctctgtctgacgcttggaagattgcataaagcggctaggacgcgtgcgttgaaagcgcctgaggcgcccccgcaggcgccgcagtccagtgcagaggcataagggttattcgtgcttctgctgccgtgcccgcaaatgacaaccagcggagcgaaccggtctgtgatgcccatcatcttcaatgcctgtctggcataagcggctttttcttcttccgtaaatccgactggaatgccggcttcagatgtttccatgcgatcaagcgagagctttgtctgaggcttcttcagccatgttttccgcgcatttctgaatgcttgcccggctgcgcgggggacaaggctgcgcgcggccatttgcaggctcagccaaggcccgctcacttcgggaagcagcatgcccgccaatagattctgtttcatcgttttaaaggcggagctcagtgaagctgccgcttttttatgttcttgatacgacttaaagggtaattcttcggccgtttcttctactcgatgctgcggttttaggatgaccggcagagagctgtggctgtgtttagtgcctagttcgcacgtttcgattgccatattgaaaaagcccgctgttccatatgtttcaaaagggcctgacttttccaatgccctgcggaacggctctgaacggacgtcaatacaaaatgcgaattgggccagcaccgtttcgcttttgtcagcagcggcaggtttgtttgccgtgatgagcttccttacctcagcggcgtatgtttgttcccaagcttccagccagagacgcctgcgcgttatatcatcaaagcggcgggcgagtgttaatctcgctttttgctctgctgcggaaagttcgagccattcttcaggcgtaaggccgccccaatgcagccaggacgcaatcaaaggaacgagctgcatctctttttcaggattcggcttagacatcggtaaataaggctcaataagcatccattccattgaaagccggacagccaaatactcgagcagcagttcttcttcgtcctgcgattgctgagaacgccaaagcatcatcccggcccatcccggcagagaaagcagatgagcttcaaggtatgcctgaacgtctgcattggaaatatcaaacgctcggagcgcttttttcatagcgtcccgcggctcttccggccatccattcaggcgttggcgttctgcgcgcgacagagcgggatcatgttcaacaagctgccgccatgcgctgtaaaaccctttctcacgatgcggaagccgccatgccgattgtgattcatcaaggaacagcttgcaccatttaatcacatgatggtcaaggaggtgagcacttttctgtccggcaaaaacgctgagcggtttgataaagcttgtttttcggccatcgattgtcccgcgggccgcttgtttggcaagctttttcacttgccgggatctcaagagctgtccaggtatttcgtccagcttgagggcggctttgcaaaatgcctccgctgtttccctctgcatgccgggctgatgtgaatcgagccaattgatcagctttttttcaagaatcgtctcaacgatttctccccgttgttttgcggaacggaaaatggaggactttgggtagatatcaacatgaagctgctgtttaagctgccgggccgtctgttcaaatgtttgttcttcaaggcccatccacggatgacgagcggcaaaggtttcaatcggccaaagcggcgcgatgacccgtgctgctgattgaaccaactcatccatattaaagtccgcagtctgatgttcatattggaatatcaattgtttagacaatgtgggtgctgctttcatgattggcgacctccctgagtaagatattggtcaagataattcggccgttcttcgaccgattcgaaatggggttcacccgttttcacaagacgtaaataaagtgcgccggaccatgcaaagcgctgccgaacgatcaacgcgccggccgcactgccggctaacaaaacgactgccgtcaaaacggccgccattgcaggcggctcagccccctgtacaacagcatccttcaggagcccgtgtaaaacggaatgaatgatggcaaacgcgagtgaagcccctgttaaaatgaaaagtccggcaattcgtgtgacgcgtccgtaattggctgtgacaagctgcctccaagcaatgaacagtgcccagcctaaaacaagggcgctgatcaattgatagccatcgtccgcagctgaggcccagattccgatgacgagagcaagagcaaagacgccgcctatcatgttccaaaaaagagccggtctgcccggtttagatgcgaacgattcataacggcgcaccgctgatccggcttgcaggaaaagggcggctttgaacaggccgtgcaaaatgaggtgaataacagccgcaatataggcccctaatgcgcattggacgagcataaaacccatctgcgcgaccgttgaagctgcgagctgccgcttgtagtccgtttggacgatcatcatgcccgttccgagcaagacggaaaggacggcgggtacaagcagaataagctgcagtacatcaccgctgaacatcggtgcaaaacgagtcagcatgacgccgcctacatttacaagtccggcgtgcatgaccgcggaaacgggagtcggagcgattgctgaatcgagcagccaacgatgaaacggccactgtgccgcaggaatcatcaccgttaaaatgacgaggaggccgatcccggttttctcccatgagctgagctgtacaaggctttcttccgctatggcggatgataatcgccagtgtcccgtcgaaagagacagccaaagagcggcagctgctatcgccagccagctgagcgcaaagatccggcccgcatacaaagcggcatttttcgccgcctgccacgcgctgtttaagccgattagcgcagtcaagccgagcagcgtgatcccccagcataaaaggagccagcgaagatcatcgttcagccaggcgcatgaagctcctcctgtcgtaagcgtcagcagcacaaaaaatttacggtaggagcggtcgccgaataaataccggacagagtagcgctggacgatgaagccgatagtcaagacaaacaaggcgatcagccaagcaagcgaatccaagcgccaagaagcttcagcctgcccgggatttgccgttatcaatgctgccagcgcggcaagcggaggcagggcgatgattttggcatgaatccgtacatatgccaatggaacctttcgattcaggacgagcagtgcgctgaacatacaaagcgcaagcgacgcgaaaaatattttcagccaaaataaagaatctagcatatcaaacatccggcatccctccgtcgggatgatggaatagaacatactgtttcatatcttgccttcctttctgaaaacgtaaaaaaagccggtatattcaggactggcctatttcagccaatctttctgaatgataccggcttatctttaactcatgttcatgctttaaagatcttccgtttttctatgacaattttttttgcaggtcgtttgccaatttaaacaccataatccgttcgcctgtgcgcgtgctgatatccgtatgaaagctgatcgtctcttcaccggtcagcttcttcatcatgcggctcagctgctctatacccgattccaccaaaccggagcgggttcttttaattgacagcaggccttcttttgtactgcaaagttcgtattcggcgggcgtcaaaataccgttcagggaaacgatgaccatatttcttataatatctgttttaacagatacggatccgcgtcccaaatagtctttttcccattgggttaaggctttgcttatctccgcctccaaagaccccttcgtcactttctgtttttccaatgctatatcctcctgaaaaacggtatatttcttttccttatacaagagaatagggaaaatgaaatataccgtcctatcaaaatgttaatgtcatgcatggtaaaggttgctttttcatgcgaccataatgggattatagccgaatgctaaagctcttttgcatgagattacgattattgattttacggaattactttttaaatatcatatcttttaagatttatgatgtcaataccgttcttttattggataaaaaagaggaatgccgtcttagcagacgagcattcccttggcgactgcaccggctttttccttgccgttcagcagttcggcaagcttgagggcaaacgggatcgtggtcgccggccctctggaagtaatgatatttccatcaacgacgacgttttcatgtgcggtgacatccgcccctgttaaatgttcttcaactcccggatagcaggtcgctttttttccgctgacaagccccgtttttccgagcgtcatcgttgccgcacaaatggcggcaacatattttcctgcatttgccgcttctgtcagcgtcttatgcagagcttgatgctccagcatttttttgctgcctacatttccgcccggaagaatcagcatatccgcttcttgccaatcagcatcgtcaaacatgacgtctgcctcgacgacaatgtcatgtccgcctttcacgctgcgcgatggatcaagcgagacggtgacggtctcaacttctgcccttcgtaaaacatcaattgttgctatcgcttcaatttcttcgaatccgtcgattaaaaaaacatacgctttcttcatgaaaaaacctccttcgtctctaccgttcattctaaccgcggcaacgacatttccgcaactgacgaagtagacaaattgagacacctgtctcgttttgtctcttgttctgaaaggatgtccgcctgaaaagcggcttatgttcgcttcggagagctggcacgatttttgcatcataacgtgtgagtaaaaaagacaggaggttttttcatatggaagaggcactgacaaaggaaaaagcagtgtggatgtatcaaaaaatgctggaaatccgctatttcgaagatcaggttcatcagctgtttgctaaaggaatactgccgggttttgtccatctttacgccggagaagaagcggtcgctgcgggcgtctgcgctcatctgaatgatgaagacaccatcacgagcacacatcgcggccatgggcactgcattgcaaaagggtgcgacttgaaaggcatgatggccgagatatacggaaaatctgcaggactttgtaaaggaaaaggcggatcgatgcatattgcagactttgacaaagggatgctaggcgcaaacggaatcgtcggcgggggatttcctttggcctgcggagcagctctcactgcaaagtataaaaagactaaaaatgtaagcgtttgcttttttggcgacggcgccaacaaccaggggacatttcacgaagggatcaaccttgccgccatctggaagctccctgtcatatttgtcgccgaaaacaacgggtatggcgaagcgactccgttttcctatgcgtcaagctgcgagtcgatcgcagatcgtgcggccgcttatgggattccgggcgttcgcgttgatggaaaagatgcggccgcggtcttccaggctgcgggccgggcgatagagcgtgccaaaaacggagaaggaccgacgctcattgagtgtatgacataccggaactacggccattttgaaggagatgcccagcgctacaaaacaaatgaagaaaaagcggtgcatcaggaagaaaaagatgccattgccgtgttcaaaagcgaactgctggcaaaagggctgatgagtgaagaagagcagtcgcggattgaaaaagaagttgaagaagcggtcgaggaagcggtcgcattcagcgaaaaaagcgcttatccggaagaaaccgaactgctgacggatgtatatgtatcctattaattcatgaagggggaaggaaacatgacgagggaaatcagcatgtcagccgcattgaatgaagcgatcaaacttgcgatgagaagggacgatcacgtcattttaatgggggaagatgtcgcaggaggagcgaatgtcgatcatctgcaggatgatgaagcatggggcggtgtgctcggcgtcacgaaagggattgttcaggaatttggacgggagcgcgtccttgatacgccgatcagtgaagcggggtacatcggcgcagccatggctgctgcttcaaccggtttaaggccgatcgcggaattgatgtttaacgattttatcggaacatgtttggaccaggtgctgaaccagggagcgaaattccgctacatgtttggcggcaaagcggaagttccgattacgatccggacgacccacggcgccggctttagggcggccgcccagcattcgcaaagcttgtatgccctatttacaagcattcccggactgaaagtgattgtgccgtcgaccccgtacgacgcaaaaggattattgctcgctgcgattgaagatcaggacccggttatcttttttgaagacaaaacgctgtacaacatgacaggcgatgtgccggaagaatattacacgcttccaatcggaaaagcagatatcaagcggaaaggcgccgatgtaacgattgttgcgatcggcaaacaggttcatacggcgcttcaagcggcggaacagctctcagcgcggggaatcgaagccgaaatccttgatccgcgaagcctttcgccgcttgatgaagaggccgtccttgcatccgtagaaaaaacaaacaggcttgtgatcgtcgatgaggccaatccgagatgcagcatcgccgcggatatcgcatcattggcggcagataaaggatttgattcgcttgacgcaccggttaaaaaggtgacggctccgcatacgccggtgccattttcaccgcctcttgaagacctgtatttgccgacgccggaaaaagtcgtgaacaccgtgcttgagatgctcggagaaacatcaacacatacggtgtaaagattggaaaggagaggagaacatggctgtcgaagtggtcatgccgaaattggggatgtcgatgaaagaaggtacggtttccgtctggaataaaaaagtcggggaagccgttgaaaaaggagaaagcattgccagcatcaattccgaaaaaatcgaaatggaaatcgaatctccggcaaacggaaccgtgttggacatccaagtatctgaaggagagggagtgccgccgggaaccgtcatctgccgcatcggaaatgaaaacgaacaaacgcaggagagccaaacaaaacagccggatcccacgaaagaacggattaaaatttctccggctgcgcgcaaaattgcgcaaagcgcaaatatagacatcaaaacgctgaagggcacaggccccggggggagaattacgaaagcggatgtgttgcaggcgcttcccggccggccgaacaagcaggcggctaaggctgaagctgaagagcggccgccggcaagcccgatgaggaaaacgatagccgcaagaatgacggaaagcctgcaaaacagcgcccagctgacgattacgatgaaggcggacatcacgaaattaacagtcctgcaaaaacagcttaatgaaaccgctcaatcaagatacgatacgaagctgacgatcactgattttgccgccagggcagctgttttttcgcttttggatcatccggccatgaacagtgtttatcaagacggaaggcttgcgacctttgagcatgttcatttaggagtggcggccgctttggacgaaggcctggccgttcccgtcatccgccatgccgagcggctcccgctgatcgaattggccaagaaaatcaaatggtacgccaaaaaagcgcgggaaggccggcttctacacgatgaaatagaaggatcgacatttacgattacaaacctcggcgcatatggtgtcgagcactttaccccgatcttgaatccgccggaaaccgggatactcggagtcggccaaatgtattcggcacccgtttatcaagacggagaactgacaaagggcgccattctgccgctcagtctgacttttgatcaccgcgcgcttgatggtgcgcctgctgcagcattcctttcagatgtgaaaaactatttggaagatccggcatcaattcttttatagagagaaggtggatagactgtgacacttgcaattataggagggggacctgcgggttacgtggcggcgattacagcggccaaaaatagcagagaagtcatcctgattgaagatggttccctcggaggaacgtgtttaaatgaaggatgcataccgaccaaagcgcttcttgaaagcgcagatatgttcgagaaaataaaatccgccggcgcattcggaatcgggctgtcaggcgaaagcccgacggttcactgggaggccgtccaaagccgtaagagagagatcattcagcggctcgccgggggtattgaatatttgatgaataaaaataaaatcaaggttctgcaaggaaaagcatcgtttttgtccgaacacgacatacttgttgaaaaggacggaaaacaggaggtcatcaatgccgggcatgtgattatagcggcaggggcagcacctgccgcactgccttttgcgtcttttgacgggagctggatcatccacagcggagatgccatgtcattgccgtccatccctgaaacgatttttattatcggcggaggaatcatcggctgtgaatttgccagtatatacagcaggctgggagcgaacgtgatcatagccgagcaggcggaacagattctgcctgaggaagatccggatattgccgcctttcttcgcacaagtctcgaggagtccggcgtccgtgttttcacatctgtacaagtggagcgtcttgatcctgccaggcagcgcgtctttctgaaaaatggcgatgacagctttaatattcaagctgatcgatgtctcgtcgccgtcggccgaaagccgaggactgatgatctgaagcttgaccatatcggagtccaatatgacaggaaagggattcatgtcaaccagcatatgcagacaaacatcccgcatatttatgcgtgcggggatatcacaggcggggttcagctggcgcatgccgcttttcacgaaggaaccgtcgccgcatcccatgcctcaggcagagacatgaaggtcaacagtgacattattccgcgctgcatctatacttcgcctgaaatcgcaagcgtcggcttaaatgaaaaaaaggcgagggagcgctacagggatgttcgtatcggagagtttccgttttcttcaaacggaaaagcgcttattttgaatgaaactgccggcaaggtcaaaatcatcatagagccggagtatcaggaaattgtcggggtttcgatcgtgggtccgggagcaaccgaactgatcggccaggcagccgtaatgttgcatgcagagctgacggcagacgcaatggagcacttcatcgcggcccatccgactctttcggaaacgattcacgaagctttgctgcaagccgcaggtcgggccattcactgctgaataagggagaacttcgcacagcgtgagagtgcggagttttttttatcgatattgaaagcgcttttataatataatgaggaaaaagcatgaggagaggatggaatgaatccgacgccctgctatttaaatacgtggaaacgctttgttcaggaagggcttcttgatcaggcccgcttgaacaaaagagtcatggaatcatggtaccgctgcaaaaatcgaaatgtcaatccgtatttagataaaggacagtcaattttaaaaaaggatttattcgacgctcaaaaaaagaaacactcgttattcctcgatatcgccctgccttatctacacaatatcagccgtgaattaaaagagtcggaaatgatggcgctcctgatcgatgccgacgggtacgtattaagcttggccggctgccggaggacgcttgaagaggcgaaaaaaatcaattttgtcgagggcgtgcgctggacggaaacagaagtcggcacgaacgccatcggaaccgcacttgaaatcggcgaagctgtcaccattcacgggaccgagcatttttcggtcgcttcccaccattggagctgttctgctgcaccgattcgcgatgaagacggcaccgttatgggtttaatcgatatttcctgcctcacggatagaaggcatccctttatgcttgggatggctgccactgccgcacacgccatcgaacgcgagatcagcgcacatacgaaaaaaaacgaagccgagctcatcagccattgtcttgaaaaaatcgatttggatcagccgtttatcgtctgcaatgaaaaagacaaaatcgtagccgcgagcagaccggtgcgggaacgtttttccgactggaggagaatggatgtcaatgatctgtatgagcgcgggtttgccggggggcacaagcagacaattttctccgccaaagacgggaggcccctcggtaagtcgattgcactggctgaagtgtcccgcaataaaacagctccatcactcgtatcccgtttcatctatccgggtgaaacaggaacaagccgggcgtttcagcaggcgcttcaccacatgaggcttgcggctaagacggatgcgaatgtatacatatggggggaaacaggctccggaaaggaacttgccgcgagggccattcatcaggcgagcgcacggagaaacggcccttttatcgccgtcaactgcggcgccattcctgaaagcttgatggagagcgaattgttcggctatgccgaaggcgcatttacaggagcaaagcgccgcggttcaaaagggaagtttgaacaggctcaccgcggtacgatttttctcgatgaaatcggtgagatcccttatcagatgcaagtggcgctcttaaggatcatcgaagagcggaaggtcactccgatcggcggaacccgtgaagttcccctcgacatcagaatcatcacagcaacacaccgtgatctgaaagaccttctccaaaaaggaaagatacgtgaagatctgtattaccgccttcatgtttaccccgtaaaaataccgccgctcagagagcgcaaagaggacatacctgatttgttccgccactatcaacaacaacacgagtggaaggccgagtttccgccgaattttttcaagcggcttcaggaatatcattggcctggtaacatccgtgagctctttaatacatttgaaaggctcagggttttatttccggaaggcggactgatcgatccgtcccaatacagcgcggtgctggacggactcgattggaacagcggcgcaccttctgaagaagaccggctcacattcagagaacgtgttcaaaaacaaacgatgatggaagctttgcaaaaaacgaaaggaaatgtgtccgaagcggccaagctggccggaattccaagaagcacattttacaagcggcttcgaaaatataacctttagcctctcggcgcccaaagcatgacgctgacgccggctaaacagatcacagccccggcccaatcatagaggtcgggggtttttttgtcgaccagccacccccaaagcacagccagaataataaatacgcccccgtacgcggcatagacgcgcccgaacgatggaaatgcctgaaaagccgggatgacgccgtaaatgattaaagtcagccctccggccaacccgtaccacaatggtttggattccctcagccacagccatacgagatagccgcccgcgatttcagccaaacccgccagtaaaaataaaccgattgcgatcatcatcaacaacacactccaattcacgtgaattgtctctattctacacgacataaaacggccgggaaagttcccgtttttcgggaaaataaacagaacgcgagtataggaactgtctcccccgaacctgttggaacggctccttcagcatgatataagtaaattgtaaacgcttataagggggctttaaaaatggataaaacgtattcaattgtcattgcaggcggaggaagcacatttaccccggggattgtattgatgctcttggacaatctggatgatttcccgatccgacagctgaaattgtatgacaatgatggagagcggcaagacaaaatagccggcgcttgtgaagtgttggttaaagaaagagctccgcatattcaatttttagcgacgaccgatccggaagaggcgttttccgatgttgatttcgtcatggctcatatcagagtcggtaaatatgcaatgcgtgagctcgatgaaaagatccctctgaaatacggagtcgtcggccaggagacgtgcggacccggagggattgcgtacggaatgaggtctattggcggcgtgcttgagctcattgattatatggaaacctattcgcctgacgcgtggatgctgaactattcaaacccggctgcaatcgtcgccgaagcgacaagaaggctgcggccgacatcaaaagtgctgaacatttgcgatatgccgatcggtatcgaagacaggatggctcagattctcggactgtcttcgcggaaggagatggttgtccgctattacggccttaatcattttggctggtggacgtcaatttgtgataaagacggcaacgatctgatgccggcgatcaaagagcatgtcaggaggttcggctatattccggaacaggagcatgaaaaggctgaggcgagctggaatgacacgttcaaaaaagcgcgggaagtatttgaactcgatcctgagacgcttccaaatacgtatttgcaatattatttttatcctgatgatatggtgaaaaaatcaaaccctgaatttacccgggcgaacgaagtaatggaagggcgggagaaattcattttcggcgagtgtgaaaaaatcgcaaaagcccaatccagcgccggcagcaaaatcgaaattgatgatcatgcttcatatattgtcgaccttgcgcgcgcccttgcattcaataccggtgaacggatgcttttaatcgttgaaaataacggagcgatccaaaacttcgattcatcggcgatggtagaggtgccttgcattgtcggcaagaacggtccggagccgatcacaatcggcaaaataccgcagttccaaaaagggctgatggaacagcaggtgtcggttgaaaagcttgtcgttgaagcctggattgaaaaatcgtatcaaaagctttggcaggctctgattttgtcgcggactgtgccgaatgcacgaacagccaaactgattctcgatgatctgattgaagcgaacaaaggctattggccggagctctccgcggaaaatcttcagctgtcgctttaaggatgaaagcgcctggggctcctgagccagaccgccagcccaggcatatccccccatttattctcgtattttatataatagagacagagaataaatggggggaaaatgatgcagttggaagaattaatgaacaagcattataaaaaattgaacgaaaacgatttttatgttttgaaatatattttgaaccatcaagacacttgctacaagctgggcatcaacgaattagcaaagaagtgcaatgtatcccgcacatcgattttaagactttctcaaaaactggatttcagcgggtacagcgagttcagggtgtttctgaagtgggaggccgagaagcgggaagaagagcgggaagattgccgttcctttgaaagcctcatgagggatatggaagcgagcatgaaatatttgaaaaatacggatttgcgaaagatatgccagctcattgacgaagcggaccggatttttgtctatggttcaggcacggctcagacgacgtgcgcttatgagctgcagcgaatgtttgtttctcagcaccgttatttgacggtgatcaaagatcaaatcgatttcgacctcatgtttcctgattttagcacggccgatctgatcatcatcatttcgctgtcaggagaaaccccgtcgctgattccgcaggcacagtctttgtcggctaaaggcattccttttatctctttgacgaatttgaaaaataatctgctcgcccagctcactccttacaatctctatgcgccgagccagacggtgacggtttatccaaaaacagagctgaccgcttttgcacccttttttctcgttggggaagcgctgtttcgcagctatgtcgactatgctgaagaaaagaaaaatcaggagtaacaggggggattcgcattgatgcaaaaagtacagcggttcggaagcgccatgtttgtgccggttttgctatttgcttttgccgggatcgtcgtgggcctcagcacattatttaagaatgagcagctgatgggatcgcttgccagtcaggataccttttggtatcaattctggtatatccttgaggaaggcggctggaccgttttcaggcaaatgccgctgttgtttgcggtcggaattccgatcgcactggcaaaaaaagcgcaagcgcgggcatgtttggaagcgcttactacttatttgaccttcaattattttgtcagcgctattttgactgtatggggcgactttttcggagttgatatgactcaggaagcaggaggaacaagcgggcttgcagaaattgccggcatcaaaacccttgatacgaacattatcggggcgattctgatttcatcgattgtcgtttatatccacaaccgctattttgataagaagctgcccgattttttagggatttttcaaggctcttcattcgtcgtcattatttcattcgcgattatgcttccggtagcactggcaaccgcgtggatttggccgatggtgcaggacggcattgcgtcgctgcaaagcttccttgtcgcctcaggtgctttcggtgtatgggtttacacatttttagaaagaattttgatccctacgggcctgcatcacttcatatacacgccatttgttttcggcccggccgtagttgaaggcgggattgtcacctattgggcgcagcatctcagcgagttttcagcaagctctgaaccgttgaaagagctctttcctcaaggcggattcgcgctccacggaaactccaaaatcttcggaattctggggatcgcactagccatctatgtaacagccaaaaaagaaaagaaaaaaatcgttgccggtctgctgattccgatcacgctgacagcggtaattgcggggatcacggagccgattgaatttacgtttttgttcatttcgccgctgctgtttttcgtacacagcctcttggccgcgacgatggcaaccttgatgtatgctgcaggggtggtcggaaatatgggcggcggtttaatcgagattttaacgctcaactggatccctctgtttcatcagcacggcagcacttatgtttttcaaattttgatcggcttgtctttcaccgccatttacttcttcgtattcaggttcttgattttaaaattggatattgccacgccggggcgtgaaaaagaccagcaacaggagacaaaattttattcgaaaaaagattacaaggcgaaaaaagaatccgaaaaagaggtttctgcggcgcaggaaattgctgagaccgatcaggcggttctttgcatcaaagcgctcggcggaaaagaaaacattgcggaggtgacaaactgcgcgacaagactgagagtcagcgtgtatgacgagtcaaaagtggagccggacagtacgtttaagtcctttggtgcgcacggtgtcgtcagaaacggaaaagccttgcaaattattatcggtctttcggttccgcaagtccgtgaaagggtcgagaagctgctgaaccaatcataattgcgccggtgcaaatggcatctcctgaaatgacacatgcaagctgcagagacttgcatgtgcgattgggggatgctcttttaatgcaaagacaagctaacgcttcacaggttatccacattagctcgctctatgccgatgtttacctttttttacaattcagcacgtaaatttcattcttcagccgttcagatgttttaatgacaactttttcggtgccctgaaaatccaaaatgccgtcgtatctttcgatgacttcgtcaatatgtttgaagtggcggacgtgggcgcgtgaatcatagttaggcacagaaatcaccatgtcgctcccttgaggaagactcgataaaaacgctttgtctttctctatatgctctaacacttccagcaaaacaaaaacatgatatttttgcagcatccggacgatcgcctcgtcatatacatttccttcgatgaaagtaaacgagggattataccttttggcttcttcaagcattcctttggaaaaatcgatgcctaaatattttctgtatcctttgtcatataaaagctttgcgaatctcccagtgccgcagccgatatcgacaatcgtttcatctttggactccggcaataaacgtgcagcttcttcatacacctttctccacgggcttttttcaagcggaatcagatgtcggtcaataaattgatcataaaattcagctggcatttccgttcccatgtttttcacctcgaaatcttttaaatcatcagtaatagaaatatatgtccggaaagaaaatgcgtgcgggaagaatccagccgataagaaaaatagatctattcatcattgttcctgctgctctaaaaaatctattattgtgtctactatttcttgtgcacgcgcatgataggtatgctgtgaatgaacgagacggtagccgttgtctgtgatacgctgcctttcttttttattttgaagatagtattttgctttgtcataaaagtcttcaacttcacaagcaatgaaatgggtgccgtctttaaagccaagatcgaaaatatcttgatttggctccgccagcaacagcgttctgcaggcaggggcttcaaaaaattttaacaacgggtagcggagggcgcttccgcatgtgaaaaatatctttgctctgttcaattcctgggcatatttttcattcaaaaaagcctgcttgatttcttcttcgtcagttatgacattgccgggatgggggtggtgaacaaacccttcttcatgcttcatggtctgcaatacagcctccctaaaaaggtattttccttttgggggatatcttttgtttccttcatgtacaagccccatgagcaaatagtctatcgttttcttcaacttccagtccttgaatatttctggatcaactgcccatggaacccatctgaatttgtctttgtactgggggtattcatttaaaaaatgctcttttgtcactgaaaaaattaaatcaatttggttgtcttcgaaatagctgcttctgatctgtttattaaaatgagaatcgatcacaaacgcgccggtggggatgtttgtatctttgagccccctaatgtttggggacaatgagaagccgtaggcaatgtcgtagtggaaaatgaaatcaggacgaaattggattttgtccaatatatccggaagatagccgtccgtatgccagtacatgacttcggcaaactcctcaagagatttcatcattttatactttacttcatgtttgggcatggtcttccaaaacgttttaatcagaaccaatattttcaagcatctccgcatttctttctcctctcaagacatcttcgtcatctttccctatttaatatatgaggattaaaaattgatgttcaggcaagcgttaaaaagacggggggctgggggcagcttgaaaatatgcggaattaatcagcaaaacaaaaaggcgatgcacctgagatgcacgccttttttaatgattttcccgttcattggcttcgtccagatcgatccattcctgcgaccatttttccattcctttaaggaccggttcgagcgcctgccctttttcagtcagggagtattcgatccgcaccggagtttctggatacacatgccggtggatgaggccctcgtgttcgagttcttttaatctttcggataacagccttccgctgatgggaagggaagattctatatggcaaaaccgctgcgggccgttaagaagctggtgaatgatgaatccgttccagcgctgacttatcattttcattcctttttcaaatttcggacataaagatgataggctcatgttcctcacctctctaggtctattataacggtatatcaatgaatgagcaaagctcataaaatgtcttgacgtaagtttgttatttatatatactaacttacacaaagtaagtaacgaacgaaaaaaggaggacactgcagacttattcaagcggatatgttgatagatggataaagttggcgttcgtcattggtctttaaaataaaaattgaacaagaggagaaaataatgaacaacaaatacgaattaggtgcattaattttacgtttggttacaggtcttacatttttgcttcacgggctttcaaaatttcaaggcgggattgaaaatactgtaggattcttcagcagtgtcggaattccgggctttctcgcctatatcgtagcgattatcgaattggccggaggggctttgatgattctcgggctcggtacacgtgtgattggccttttatttgcgattgtcatgctgggggccattttcactgttaagctctccgccggtttcatgggaacggatggaggcgcaggctatgaatttgacgttacgcttcttgcaatgtctgtatacttggccttgagcggaagcagcatgctgtcccttggggaaatgatcctgaaatcaaggaaagaaggaaaaacagatgacgcagcaaatccacccgggcactgagctcggatatgtcaagctgaaggtgagccgtcttgaaagatcggtttctttttacagggatgtgatcggttttcaagtattaaaacaggacggcaaaacggcggagttcacagttgacggaaaaaatccgcttttgatcattgaggagattccaaatgctgttgttcttcctgaacgatcggcagcaggcctttatcattttgccattttgcttccaaaccgaaagcagctcggcatggctgtgaagcatttgatccgcgccggcattgaactcggccagggagatcaccttgtcagcgaggcgttttacttgtcagatcctgatcaaaatggaatcgaaatctaccgcgaccgtccgcgagagggatggaagcgcgatgagcaggggaactacgtgatgggtacggagccggttgatgtccaaggacttctggaagaagccgatggccacgaatggcaaggtcttcccccggaaacaaaaatcggacacgtccattttcacgtccgggatttgaagcaggcgaaagaattttaccactctgtactgggatttgatatcacaggagattatcaacacatgtcagcgctttttgtctctgccggaggctaccatcatcatatcggcttaaacatctgggccggacagcatgcgccatttgccccgcttgatgcggcaggcatggcgtattacacggttcttttaccgaatcgagcggaacttgaccgaattgcaaaaaaactgaaaagctcgggttatgccgttgagcatgaagaaaacgcatggtttgttaaagacccggcatcaggtattgatatcagattgaccgtttgaaaaggcgaaactccagtttcgcctttttttatgccattcaatcaaaggacaacaaaagacaaagaatgagaagaaacagacattaataacaaagattcaggggcagcagctatgctaacatgaatttgaaaatctggaaatgaggggtgaaggttgatggcaaaaagcctgactggcaaggcgaaacatcatccgcctgtctggaatccgaacattgacggcgggcggttttgcaatcccgttcttttcatggactactcagatccggatgtcattcggaaaggcagcgacttttttatggcggcttcaagtttttcctgttttcccggaattcccattttgcactcgacagatttggtgaactggtcattgatcagccatgtgtttgacgagctccccttcggcgaatatgaggcccctgctcatggcaaaggagcgtgggcgccgagcattcgataccataacggagaattctgggtgtatttcgcaacgcctgatgaaggaatcttcatgagcaaaacatcagatccgtttaaaggatgggagcctctcatacaggtcaaaaagacaaagggctggattaatccttgtccattttgggatgacgatggaaatgcctatctgatccatgcttacgcaaacagcagaatcgggatcaagagcaagctgaatctttgccgaatgaaaaaagacggaacggctttggaagacgatggagaaatcgtctttgacggcacgctgaaccaccctacgattgaaggaccgaaattgtataaaaaagacggctattattatatctttgctccggcgggaggggtgaagacaggctggcagacggttttgcggagcaagcagatttacggtccctatgaagacaaggttgtccttcaccaaggaaatacggtcattaacggtccgcaccagggaggctgggttgaacttgattccggagagtcatggtttatccactttcaagatcgcggagcattcggcagagttgtgcaccttcaacctgtccgctggttcgacggctggccgctgatgggtgaagacataaacggcgacgggatcggagaaccggttttgcattgggaaaagccgaagacgggcgccaaagaagtgaaactgccctttgatcatggcaatgatgatttttcttcttcagaccgccttgcgcttcattggcaatgggaagcgaatccgaagcaagaatggtactctctcagcgccagtcccggccggcttcgcttatacagccgcggcatcgctcatccgttcaaactgagccgcctgccgaaccttctgatgcagaaattttcggggccaagcttcacagcaacggtcaaattgtcgctaaacgccttgtcggaaactatgatggccggcttggctgtcatgggaagggaatacgcctatctcggcttctcgaaatcagaaaacggttatcggctttctgtatacgaaggccgtatagaaggtgatcaggaagatgtcaaaacagaagagcgcggcgtacatgcggaaatggtctatttgcgcgtgactgttgatgaacaggcggtctgccgtttcagctgcagcatggaccggcgtcatttcacacagattgggaattcgtttcaggctgttcccgggctgtggacgggtgccaaagcaggtgtatattgcgccgataccggcggagaagacggacaggacggatggtgcgatatcgaatggttcagtgtcgaaccggcaggaggggaatgccatgagcggtgaacacacatatacgaacccggtgttgaccggttttcatccggacccttcaattatcagagtcggggaagattattacatggtgaactcaacgttccagtatttcccggcaatcgttatttcccactctaaagatttagtccattggaagatcatcggccacggaatcacggaaaatgaaggattggacctgtcggatatcaatgattcgcacggcatttgggcgcctgatatttcgtatcataacggaaccttctacatcttcgcgacgcacaggctgaacggaccgactgtcatcaacggccgaaagctgatccgcaggcagattatgatcaagtccagccgccccgaagggccttattcaaagcccgttttcattgatgaaggcagcggcatcgatccttctcacttcgttgacggcgacgggaaacactatatgctgctcagtcctgcctgcacgctctttcctctaaatgaagaatgcacagacatctccggcgagccggttcagatatgggaagggactgggagaagggcgcctgaagggccgcatttgctgaaaaaagacggttattactacgcgatattggcagaaggaggcaccggatattcccactcgattacgacagcccgctcaacgcatttgtacggtccttatgagccctgcccgtataatccgattttaacgcagacagacccggatgctccgattcaaagagcaggacacggcaagctcgttgaaacccagaatggagaatggtgggcggtgtatctatgcggacggcccaatcaaggtagctatacaacggttgggagggagaccgctttggatcccgtcgaatggacggatgacggctggtttgtcatcaacaacttgaagggcccgagtcttgttcagcgcgctccaaacctcccccaagtcaaatgggatgaaaagaatttcgacgattttgacgaggatacgctcggtcttgactggcagtttgtcaggaatcccgatcattccagctggtctttgaccgagagaccgggatatctcaggctgtggacaggtgattgggatttacatgacatccgtgcaaaaaatacggtcgtcagaagggaaaagcaccacctatacagcgccggcgtgaaactcgacttttcaccttcggcgtccggagagcaagcggggatcgtctgctactacagcacgaataattatttgaaatgctgcttgatctatgaagaaggattgaagatcaaggtcgtggaaaatcgctccggttgccaaaaaacgctggggaaaaaacatgccgaggccggcccgctgtttctgaaagctgtcatcaataagcaaaagagggatttttactacagttatgaagggaagcattggcaccacgcgggcggtacagaggacgccagttttttaagcgatgagggttcgcgtgacgcaaagggacatacgggaacgatggtcgggatattcgccaataacggcggaagcggcagaaaggctgccgctgattttgactggttccgctatattgcatattaaatgtctctgctttttttcctgtattgaagcggcgggatgccgacgatctctttaaacactttattgaaatggctgatatgcttaaaaccggtatccgcagcgatgtccaatattttctcgtctgtatcacgaagccgttttttcgcttcgcggatcctgatgtgccggatatactcctgaagatgaaagccggtcacttttttaaacactctgcttaaataggatgggctgatataaaattgtccggccaatccgtctaacgtcatcgtttcttgaaagctgcaattgatatatgaagcgatttccgagattttttcatccatcgggtgaagcggccgtgtttgattgcggccgccgcccgcaaggctccggtaaatggtgaaaagcagctgaaacagcagcgccctgacgacatcctcgtgtccttcttttttcagcttgcactcctttttcatctccatcagcatatgttcgactgcggcctgttcacgcagggaaaatgcgatgaagttttgattttccggaaacggaagaagccgataatggctgcacttcagcaatggttctatgaaatcgtgcgagaaattaatcaggatgcgttcgaactcttgaacttccgtgcttgacgttcggtggaggtcgtggggattgatgatgatcatcgtgcctttttccgcggtatagacgctttggttaataaaatacgtgcgttctccgctcagcagataatacagttcatagccttcatgaacatgcggcgcgttcatctcggtaaatccttttctctgcatatattgaatcgaaaaagaatgctcggctatgaaatatttaggatggagcatgtcgggcattcctccttgagagcgttttcttaacaaacgtgagggatcgtatgaaaaagttatgttgcctgatcttggtcttggttttttccgcgggctgtactcagcaaaaggcatcaacggaagaggacggggcgcttgaaatcaattggctcgtaccgctccacacaccgcagcctccgaaagagaaggcgcttgacatcattgaagacaaaacgaatacaaagctgaagctcatctgggttccggattcaacaaaagaagagcggatcaatacaacccttgcaagcggaaacatgcctaaagtaatgacattgcctgatcttgaagattcagcggttgtcagcgcgctgcgctcgggaatgttctgggaaatcggaccgtatttcaaagactatccgaatttaagaaaacttgataaaactatattgaaaaatatttcggttgatggcaaagtttacgggatttatagagaaaggccgatggccaggcagggagtcgtgattcggaaagactggctcgacaatctcggattggaaatgccggaaaccgttgatgacctttataaaatagcgaaagcatttacagaacaggaccccgatcaaaacggaaaagacgacacgttcggtctcgtcgaccgcaatgatctcaccttcggagcgtttaaaaccctggcttcgtactttggcgcgccgaacgaatggggaacggacgaagacggaaatctcttcccctattttaagcatgaggcctataaagacgcaatggcatacatgaaaaagctttatgaagaaggcctgatgaacagggactttgcggtgacaagcaaaacgcagcagcaggatttagtgattcaggggaaagcgggaatctatatcggcgcgatgagcgatgcatgaacttgcgtgatcagggactcgctttgaaccccggctttcagcttgatatcgcaaaccggatcaagggccccgacggcaaggagcgcacatgggcgctcggcgggcatggcgggatgttcgccatttcgaaatcaagcgtcaagactgaaaaagaggtcagaaaaatcctcgcattttttgacagaatcgctgaagaagacctcaacaatttgatgttgtatggaatagaaggcgtacactatgaaaagaaaggggggagcggctattttcgaaagcaggaaaactaccatctgtgggaagcggaaattcagccgttaaaccagctgattggcgtcaataaacaagctttaaaaagcgctgaagatccgctccgcgccaaaaatgaaaagcttgaggaggacaaccgggcaatcgcagtccagaatccggccgaaccgctgtattctgccgcacagatggacaggggaacagaattgaagaaaatcattgatgacgccacatttcaatttattctcggggaaatcaatgaaaaagctttgaccaggcagtcctgaaatgggagaagcatggcggcggaaagatcatgaaagaactgaatgaagatctgaaaaaagcaaactaaacagaaaaccctttccatttttttgaaaaggaaagggtttttcatcgtattcgctccaagttcattttctttaaattctgcaaaataaacaatataattccatcataggacgaaaaggaggaagcgatatgcagactgccgttatatatgcacacccaaatccaaacagtttcaacggagccattttaaatcaagtcataaaggcgcttgaggacggtaagcatttttatgacgtcattgatttgtatagagaccggtttgatcccgttctattatttgatgaaaagaaaaggcgctcagatatgaaacgcgatccggaaactgccgaatatcgaagaattgtcaaaaacgccgaccatctgattttcatttatccgctttggtggggcggaatgccagcgatcatgaaaggctttattgaccgcgtttttgccgccggagaagcctatacatatcaaggaaagctgccaaaaggcctgctgaaggcgcgcacggcatcagtttactacacggctgacgctccgtcttggtatttgcggttttggcagcgggatgccgactgggtgacggttaaagatgtgatgttgaagttttgcggcgtacggcgggtaaagcgcctgctgtttgccggcgtgaaagacagctctgaagaaaaacgcacgcaatggcttgaccgtgtctaccggtctatagctcctgcagatcgggggatcagcaaatgacaaaggagatgaagtggctggattgggcaaaggaaattcaagctatcgcccaggcggggcttgcctatacaaaagatgactttgatcgtgaacgttttgagcagcttcgcgagctgagctgcgaaatcatcgccgattatacggaaacggacttctctaaagtgaaagagctttttgccggggaatcgggctatcaaacgcctaaagtcgatgtgagagccgtaatttttaaagatcataagctcctccttgtccaggaaaaagcagacggcaaatgggcgctgccaggcggatgggcagacatcggctttacgccgaaagaaatcgcggttaaagaaacgcttgaagagacaggtttgaaagtcaaggcgcataaacttctggcggtcatggataaaaagcgccacaaccaccccccttctgccttccacatctataagctgtttatctcctgtcaaattgtcggaggcaaggcggaagcggggactgaaacacaaaaccttgtttttttctcattggagaatctgcctgaattatcggcagcaaggaatacctatgaacagatcgaatatctttttgaaaaacatgatgaagtgtattgcgactaagggaggaacagacaatggatcagttgaaatatccgatcggcaccttttccaaaccgcttgaagcggacgaaagggaactggaaaaatggatcggggatctgaagcaagcgccgcatctcctgagaagcgcggcggcgggactaaatgaagaacagcttgatacgccgtaccggaccggaggctgggctgtcctccaagtcgttcaccatcttgccgacagccatatgaacgggtatattcgaagcaaattggcgctgacagaagagacgcctttgatccgcacgtttgacgaacagaattgggccgggcttaccgatgccagaacgctggatccggatttgtcgctggcgcttttagacacgctgcatctgcgctgggctgctcttttttgaatctttgacagaagcggattttgaaaaagcgtacatttatcctggcacaggtgaggagatgaagctgtatcaagcgcttgctctctatgtgtggcactcacaacaccatattgcccatattaaagcgcatcgaaaaagaatgggctggaattgaaaaaaacgcgccgcgggcgcgtttttgtttgccgtttgttttcagaggggattgttaacaataacataacagcggaatcgttggttattgctttttctagccggtaaattaaggtaagatatatgagttatcacccaaaacgtgatggatttatcttgcgattagattagagagaagtggtttttcatgaaaaaaaatgcgctggcgattttaaggatcgtgattccggcggctgttcttttgtttgtcttttttcaagcgaaaaaagaactggccgggctgtcttttaaagaaacatttttgattatcgatcaaattaatcggattgacctattcatccttgtttttctcggacttgccgccattttggcgatgacattatacgattttgttctggtccgctccctcggaatgaaggtttcgaaatggaaaacgatcaaagtatcatggatcgccaactcacttaacaatgttctcgggttcggcggattgtccggtgcaggattgagaacgatcctttacaaagagcatgttgatgatgtgaagaagctgatcagggggatcgcttggcttgcgtcttcggttcttctcgggctgtctgtcctcagccttctcgtccttgccggaattctgcctgccggggatctgtttacagaaaaaacgtgggtgctgctggctgttgccggtacggcgatgatcgctcccggtgcggccgtcattttaatgatcaaaaagaagagaagcagaggagccgaaaagggcatgcggctttcggtcttcttttcttatctgggtgcatcggtgatcgagtgggttgccgcagcagcggtcatgtattattcccttgcaacgatgggcgtcgaattggacttaaaaaccgtcatcggcgtttttacgattgcttcggtggccggaatgatcagtctcgttcccggcggattcggttcgttcgacctgctttttttggtcggaatgagccagctgggggttgatcaggaaatcactctgacggcgattgtgctctaccggatcgcctattcgtttatcccttttgtgttcggtcttatttttgcagcagccgatttgactggaaatacgatgaagaggctcgaagaaaaaccgattattgccccggcaatagaaacgaccaatattctgttgattttacacagagcgctcctattcagactgctgaacggttcgctttcagtcatcgcattttgtagcggagcgattgtgatcgcatctgtggcgctgccgattgacaggattacattgataccgaatatttcgaagttcatgctggtgttttttaacggtttgtccctcagtttcggcttgattttgctgattctgccgcttgaactttatcggaggacaaagagatcttattatatgacgctgaccgctttggcgcttgcctttctgttcacgctttttaaaggctttaatattagcgccgtcttcatgattcctgtggtgtttgccctgtttgtattgctgagggggcagtttacaagggagcgggctgtctacacattcgggcaaatcgcatggggagcttttatcttcctctttactttattgaattacaatattatcgcttcacacatttgggaggcgctcggccatcttcttgtgaaagattatttcattcacagtgaacgccatgtcgacttcgcgacgttttttgcgttatttttcgttccgctgtatttcgctgttttcatctgggcgtttaacaggaaaacgaaagagatcggtgaagagcctgatccggagaaactggaggcattcttagaagaaaaaggcggcaacgctttgagccatttaggctttttaggggacaagcggtttttttattcaagcgacgggaatgcgctgattcaattcgccaaagtcggccagcgcctcgttgtgctcggcgacccgtccggccgggaagactcgtttccgctcgtgatcaaagaattccttcatgcggctgaccaaaaagggtatcttgtcattttctatcagatcgaacgcgaagacatggcgctctatcatgacttcggataccgctttttcaagcttggagaagaggcgattgtcgaccttgacacctttacaatcagcggaaaaaagcgggccggactaagggcgatctacaaccgttttgaacgggaagggtatacgttccatgtcgaacagccgccgttttcgagagaattcctcaacgagctgaggcaggtgtctgatgaatggctcggccgcaaaaaagaaaaaggcttttcgctcgggttttttcaagaagattatttgcaaaaggcgccaattgccgttttaaaaagcgaagaaggcgagatcgtcgcgtttatgaatatcatgccgatgtaccgcgaaggggaaatatccatcgatctgatgcgctattcgaaaaaggcgccgaaaggaatcatggatgcgctgttcatctatttatttcaatggggaaaagaacagggctacacggccttcaatatgggaatggcccctttatcgaatgtagggacaacgtttcagtcattctggacggagcggctggccgccgtgattttcaacaatgtcagctacatgtacagtttcagcggactgcggtcttttaaagaaaaatataagccggtttggcgggggaaatatttagcctatcggaaaaaccgatctctcccggtaacgatgatccttgtgacaaggctgatcggaaggagaacgaaatgaggccgtttattaaaacggccttttttttatattgccattgtaagaagcactcaaaaggcggtatactgcaaatgattggaagggaaggatcgaatcgacaaatgggggatcaaaatgaagccaattgaagtattaagatatgacgcattttcaaagactgcgggtcaaggaaatccggcgggcatcgtgcttgaagcagacgggttgaccgattgggagatgcagaagatcgctgaacaggcaggctataatgaaacggctttcctgctgccgagcgagtcggccgacataaggatccgctactttacgccgggccatgaaatgaatttatgcggacatgcgactgttgcttctctttatgcgcttttggaaaaaggcgcgattgaagctggcgcggagctgaaggtcgaaacaaaagcgggcgtcctttctgtgtataccgcctcagacggcaatcggcgttttttggtgacgctggagcaggcgcccccgtgttttcagtctttcacaggaagcagaagccaattggcggaagcgctggggatcagcgaagcggactttcatgaagcattgcccgttgtttatggaagcacaggtatatggacattgcttgtgccggtgagagatttggccgcaatccgcaggatgaagcccgttcaagctgaatttccgaacgttttaaccgagatgccgcgagcatctgtccacccgttttgcctggagacgatccatcgggattgccagcttcacggcaggcatttttcatcgccttattccggaacgagcgaagatcctgtcacaggaacggcatcaggagtgatgggcgcttatatgaaaacgttcggaaaggaattctgtgaagagggccagactgattttcagatcgaacagggccaggaaatggggaaagacggaaaagtgaaaatcgaagttgcggaacaaaacggcatcatgaaagtgcgcatgacaggaaccgctgtatttgctgaaaagcaaagctttgaagtgtaaacaaacaccgccttttttagcgagtggagatcattgcaaacgccagcagttaacattataatcaacaatgataatcattttcattaagggggcggccacatgaacgacacgctagaaatccaaagtattcgcgattgcgtcagaaatagaagaacgattcgaaagtttaaacaggatccggtgccgaaggaagtggtgctggaactcttggaagatgcgatttatgctccgaaccacaagctgacagaaccgtggcgattcatttatatcgggacggaaaacgggaaaaagaagcatgccgacaatttaaaagcggcgtttaaagagctcaagccgaatatgcaggaagaacaaatcaataagttcagggagcatattctcagcgttccggcttttctcttcgttattatgaaagaagacgaaaacgaacgggacagacgggatgattttgcagccgtcagctgtttaatccaaaatctgcagctgctcgcttgggaaaaaggcatcggcatggtatggaaaagcggggaagttctctctcatgaaacactgcacaggttaatgggactgaagcgcgatgagcaggtagcagctctcttgcagatcggatatcctgcggaaattcctgaagcgaagcacaggacgccggccgcacagctttttaccgaattaacttaaagaatgaggcccggaacgtcgaatcccgggcctcgattattattttgactgccgctttttcgcgcgcttatcagctgcctgcatgcgggcttgtgcttcgcggtcatcctgatcggcgagttctgctgaatattcctcatacactccgtcagcttctcgcttatactgatcaggaacttgagggagtttttgcttgtttttatcccggtttttgtggattgcatttctgcccatatgatcactcctcatcaataatcggccggtcaagccttattgttcgctgatcaggctcccgctatgcattacgatttttcccttgcggcgcgctctgccattttaaattcgcgcgaatatctgacttcctgcgtcttgttcagagtggatttaaaacgttcgcgttttttcttgtcagccatcttttaagcctcctaaaaacctaagttattcacaggctgtccgtttccgcggcatttatacaagttttaagcttcttttaaccggctgttttcctcctcgaatgttctcatgctgtacagcgtgtacaaatctttcgggatttcatacaggtgaaatgtatcgctgccggcccagtcaagatcagtcttgacggcatatgggagcttttccgcggctttgagggagcgcatatttgtttttctgattttcataaaaacggcttcaatttgcttttcataaaaaagctcgcaaaaaaacgcgtctttcgcccgctggttatagccttttccatggtaaggcttgccgagccatgtgccgaggaagcctttttgctcttcgatttcatacaagctgatgcagccgatcgggttttcccattcatcaagtattgttcgcgatatcagctttccctgttcttcctcttcaatcatgtttttgacatgaaacatatactcttcaatcgtctccgctttatttctgacaaaagggaagacatccggatgaatcatcagttcaaaaagtgcatagcagtcggtcagttcccgtttcttcagcatggcagccctccttagtttgagggcggcttttacagcagaacgggacgcgtgaatccaccctcggaattttttaattagcggaagcagttgtccgcgtatcttgcacatccattaaaaaattcggggtgggaatcgaacccactaaaaccagagatctggtggcgcaccatttgccttccctgtacgtgtatgctgctaaaaagatacttacattttacgcagctgggaaaggaaaagctacaaggattttgccggaaaacgccttttatgccagaaggttgtgcagggcatcttccagatcgggatataagaaatgatagccgttctgaagcgcttttttcgggaggacgcgctgtcctttcagcacgagcatgctcatttctccaagtacgccttttatcgcaaattcgggaaccgggagccagtgtgggcgtttttctactttcgcgacggtttgcccgaatgtatccatctgaacgggattcggtgccgtgacattgacggggccggacatcagcgtctgttcaatcgcagataaaatcatgccgacggcgtcttcgatatgaatccatggcacccattgccgccccgagccgatgcgtccgcctgcaaacaattgataggggagcgccattttcgggagcgcgcctccgtcttttccaagcacaaggccaaaacgcatccagacggtgcggatgccaagcgcttcgattggttcggctgcctgttcccacaaagctgtcgttctgcttaaaaaatcctcagccgaaactggagattcctccgtgaatgtctgttcaagactggttccgtaaattccgactgcgctcgcctgaatgagggtgttcggcttcttctgaagactttgtatgatgcgggccgactcctccacagagcggaggcggcttgtcgcgatctccgccttcgttttttcattccaacggccgaaaagcgattttccggctaaattgatccaaacatcgatatcggtcagatctttttcaggacgggcgccgtttttttgccagagaacgaaagaagtgtttttttgttcggtttcggccggttttcttgttaaaatatagacgtgatgtccccgggcggttaaggcgtttgtcaaatgtctgccgataaaacctgtccccccggcaatcgcaatcttcatcatgattcctccctttcatgatcattaaccttattgtaaaagaagaaaacaaaagaagggagttatttatgccatatattacaaagatttctgcccagaaaaacaatgaagagcgggtcaatatttttctggatgaaaaatatgcgttcagcgtcgacctggacgtgctcgtcaagtttgacctgcgaaaaggcaaagagcttgatgagcttgatatcattgagattcaatacggagacgacgttaaaaaagggttcaaaaaagcgctcgattatttgtcataccggatgcgctcgacaaaggaagttcaagaccatcttaagaaaaaaggcgtcgcagactccgcgatcacagaaattctgcatatgcttaaaggttataaatatttggacgaccgcgaatttgcggctgcatatgtcagcacccacagaaaaacgagcggcaaaggccctgatgtcttattcagagagcttaaattgaaagggatcgatgatgaactgattcatgaagcgctcagttcgttttcgttttccgatcaggtcgaggccgcggtcaagcatgcggaaaaagtactgaaaaaagaaaaaaagctgtcctccaaagagacgaagcaggccatcgaacagcaccttgtcagaaagggtttctccttcgatgtcatttcggccgcgcttcaggaaaccgattacgaaaacgacgatggcgctgagagagaagcgcttgagaagcaaggagaaaaagcaatgaagaggtacggttatgacggatcatacgaaacgaaaatgaaggtcaaacagtatctgtttagaaaaggattttcaattgacttgattaaccaatttttagatgaaaagggatgagaagatggagaaaagatacagtgaaatgactgcacacgaactgcaccaggaaattgcgggtctgaccgaaaaggcaagaaaagcggaacaaatggggattgtgaatgaactggccgttcacgaacggaaaatcgcgatggcgaaagcctaccttcttgatccggccgattttaaagccggcaacgtatacgaaatcgaagatgggggcgacgatttccatatccgctatttaaacggcgtattcgcctggggataccgtctttcgtcaccggatcatgaagaggctctgccaatttctttattaaaagaaaagggctaagacaaaaagcctaaacccttttcataactgctatcttgtccggatgcgcgtgttgcgctggagaatgatgaggtcctgagtctgctgcgtttctccgttcacctgtgcgcgcgcatgctttgtgtttgcccatggctgcggatagttttgcgttttcatctggttaaaatcgtttgtatacggtttgcgatttgcacacaacagaaatcactccatcctagaaaagtttagcgtttgccggaagccctcattctttcttgaggatgagtatttgtgcttccgtcagggcgctttgaagcaaaatcatctttggcccggggctcgccttcaaatttattgttgttcatgttcggaaagcctcttgatttatttcgcatctctttttaggctcctccaatcaagtccataatatttgcgtcttcggttcggaagacgtaaggttagtatatgaaaaggacgacgttttcaaaaagaaagttttttccttagggaaagggggaaaagccaagtggaagagtactttgaaaaactgacaaatgcgcttcttgaaaaaaatcatatgctgagctacgcacaagccagaacatgggttgaactgctgtggggcgatttcgaggcgacatttgcaaaggccggccacccgtacagaggaaaagagctgacagagcgagtcgtcaaagagtggattgagcactacggcagccagttgcatttatttcaaaatgacaagccttcttaccaggatctgttctccggagcccgcgggctgcttcattaagcattgctttagaaggaaatgatgcattgtctgactgtgccgcctggcactggccttactggatgaggacggtaagggcacactaaaacaggtgcgctccgcgtcagcaaatataaagaaaatgaagcggctttcgcgccgcgaggtcaaatcgtccggttaacgaactgtgaaagaagaaagctttttcctccgcttgcagagagagccgagcaagagcagaaaagctctccttcgggcggcagaaaacatgttgccgttttgcggaatgggaaagtgaagctgtcatgcgaaaacggccggcggcggagccagatccggttttcgcccgatgacaaagacttgctcccttttgcccgaacatatcaaggaaacggatttgattgcggcggcggggtttggcccctaacaatcagtcctgatgcaagttctcttgcggctgctttggtttcggggaagattgaacttatgtgaaaaatgtcgcaaaaggaaaaattgttatgttgccctgattgaagctaaaggaatatcatttttttaccacttgttcatagatgtctgatataatgacaaaataatcttgtagaaaatagtacagcgtgcccacagttttccttttgttgtgtgggaagcggctagatgcaagtatcctgccaagcggatgccggatgcaattttattatgtccaaaagaggtgcctttaagtgaagaaaggattcgtttcaatcattattccttcatacaatgaagcaagcaatattaaattgatttatgaatcgttaaggaacgaatttcaatccattgattatgattatgaaatttattacataaatgatggaagcactgatcgaacattggaggaaattaaaaaactagccgaaaaaagcgagcatgtgaaatatatttcgttttcacggaatttcggcaaggaggcagccatccttgccggttttcagcatgcccgcggcgatgctgttgtggtgatggatgcggatttgcagcacccgacatacctcctgcacgattttattaaagggtatgaggaaggctatgatcaagtggtcgcccagcgcaacagaaagggagacaaccccgtgcgctcctatttgtcatccctttattaccgctttatcaacaatgcggtagaggttgatttaagggacggcgtcggcgattttcgtcttttaagcagaaaagccgttaatgcgatgctgaagctgagcgaaggcaacaggttctcaaaagggctgttttgctggatcggttttgaccaaaagattgtttattacgagaacgtcgaaaggaaaaacggaaaatcaaagtggtcgttccgccacttgttgaactatggaatcgacgggattgtgtcgttcaacaacagaccgctgagaatgtgtttttacgccggtatttttatcctttttctatcgcttatttatatcgcggccacattcatcaggatcttaaaatacggtgtgattgttcccggctattttacgattatttccgccgtcctgtttctcggcggcgttcagcttctcagcctcggaattatcggcgaatacatcgggcgcatttattatgagacgaaaaagcggcctcattacttgatacaggaggcaaacatcgctcatggagaaactcatgaaaatcgtgaatcctgaatttattcgctttgccgttgtcggtgtagtgaatactttgaattactatgcggtttatttgctgctgcatgttttgcttcagttgaattatatggtttcgcatattgcagcttttttcgtcagccttgtgatttccccttttctgaactgctattttacttttaaaatcaagccgacgctggcaaagtttttgcaatttccgctgacacagctctttaatttgacggtatcttctttgttcgtctacacgtttgtgaattttttcaagatgaacagtgaggcagctccgcttgcctccatgtttttaaccgttcctctgacatttttagtgacagggaagattttgaaaaaagacaggggaagagtatgaagaaaacagtttttctatttgtgatcgcaagcattgcagtttccgtggccgcccattctttttttctgtatgaatgggcgcatgaccgctatatgacggggaacggcgacggacttgcacaaatgatcatttttaagtcgtttctttttgagcaatacaaacaagggaacttcttttattcgtattctttcggtctcgggggcggcatctacagccagctcggctattatttcacgacttcttttgtcttcatcgcttcattcgcggccgtttttctgatgcagcttttgcatttggccggggatgcggatcctttgttttgggcgcaggccgccgtattcatcagtgtcatcaagctcagcctgatcattttagcggcagcgtatgcgttaaacggtatggtgaaaaacaagcttgccgcctttacgggtgcggttttgtacggcacatcggtcatctatttcaggcacacggtgttctgggaatttttcagcgacgccatgctgtggctgccgctgcttgtcgccggagccgagaaagtcatcagagaaaagcggacagcactgtttattaccgcttgttctttgacgctgatcaataacttttactttgcctatatcaacttgattttcattgcgatctatatcatcttccgctggctgatcaggcttgacccggaaaaggaggcgccgaggtggaaacaattcagaatgttcgccgcttcaggcctgatttctttcggaatcagcgcgatttcctttgtgcctgcagtttacggctttttaaacaatttgcggccgccgtatgaccaggctgtcgctgtatacgatctgacggacaacattctgttttccagccgcattgtcttgctgccggctgtctttatgctgttcttgttcgcattttccttctataaaaataaaacgttcaggctgtttgcctcaatcagtgtgctgcttgtgcttctgcattacagcccgcttgcggcaagcgcattcaacggtttctccgctccgcagaaccgctttgaatacctgctcgcttttacgatcgggggagcggcggccgcaggaatgaccgaactgaaaaacatcaggcggaaagagatgatatggtctatcctgcttgtccttctggtttatatcgcggtcatttggcggaaagacttggatttatcacttatgcaaaattggagcattattgtgcttctgttcctgacaatcgccatatttacggcggcggggtttcaatataagaaatcgcagctttttttgcacgtctgcattttattatcgtccgtcctcgtggcgaacacgtatcaaaagtatgttctgtctgagtcaagcggcattaaaaacgtcacgaaaagctatttgaccagcaatgagtacaatggcgaagaacagcgccgcctcctgaacaacattcgaaaagacgataagggtgacccctatacaaggatcgactggatgaacggcgtccgcaacaatactccgctgatgcaggattttaacggcttcagcgcctactcaagcattctcaatcgcgatcttcttctgttttattgggaagaccttcaaatcgatatgggaagggaaagcgtcagccgctacgcatcgatgggcgaccgggccaacttgtacagtctgctgtacggcaagtattacatgacggaaaaagacaatgccgccaatgttccgtacgggtttattcaaacggatgaatcagagcactacacagtttataaaaacaaatacaccttgccgtttatccggacggcgcgaacgttgtttacggaaaaagctttagcagatgcgccagttttagcgcgggagcatgcgatgcttgaaggaatcgtgcttgagaatggcggtaacggaaaagagcagccgccgagcgttcctgatttgatgaagcagacgaagctgaaaaccgagggggcgagctatcataacggcttcctcgacgtcaccgctgaaaacggaggcatcgatctcattcccgaaggcggggttccaaaagaaggcgactattatgtcggattttatttaaaaagccttgcaaaagaccagttcttcaacttgcgggtcaatgattatgtaacatcaagaaagtcaaaccagtcgatttacaaaacaggtgtttacgatttaacgatcagggtgccgaaaacagataaaatttcaatcaggctgccaaaagggaaatatcaattggaccatttgaggctgcaccaggaagactatcaattgctgaaaaaagccgccgccaaaaaaacgccggccgccgacttgaactggcggaacaatcaagtgtccatcagctttgacaatcaaaacggagaccgctacatggtgctgccggttccgtacgaaaaaggctgggaagtcactgtaaacggaaaaacgcaaaccgttcaaaaggcaaattacgcgtttattggaatccccatcgaaaaagggaagaacaacatccgtctcgtttattacccgccgtacttcaaagctaccttggcggttacagtcatcagcctcatcatcggaatctggtacagcagaaggagaaaaaagcttggctcttaaacagagccaagctttaattttttttgaagtttttcctcgctgaaaatccatccggtataggaggtgattaattcgagcgtgtccctgtcgatgtgtgcgatcgccacgaaagggtagtgtcctttgctgcggtatcgcagatcgataaagcggacttcgtaatgatccttatacgtatcgatctcccatttgtaaaccggtgagaacgaaagaaacgccgaaatgttcttatcctgtttcgccgctttcatcacatccgtatccggtaaaggcaccctgttgaatgtgtcgacgatcacgacgtttccatccatgctccgtccgacgtaaaaagccgattttgctttgacggcgattcgccattgcctgaatttcatcgtaggcgaaataatgatttcttcaatatcatcgattttttcacggagctcatgcttgattttcctctgcatgaaatacctcaccagataataaccggccaagacgatgtaaagagccaaaaatgtatagccttgatgcgcgcctgccagccaaaaggcgatggctatgagatggctgacaaaaataaacggatcaaatgtattaatcaagccgagcgctacccatttccttgaaaacggtctgaccgcctgtgtcccgtatgcgttaaaaatatccacgaacacatgaagcgcgaccgcggcaagggtccaaagccacaggtgaagcagattggcttcgggataaaacagcatgagaatgcccggaatcatcagcgaccaggcgagaacagcggggatggagtgggtgaatcccctgtggtgcctaatataaacagcgttgtttttcaatttcaaaacggtatcgatatccggagcctgagatccggcgattgtcgcaatcatcacggcttgagccattgatgggtccattccgacaactggatcaagcgtcgcgatgcctccgagtgcaacgcccatgacaacatgtgtgccagtatccattggtgacctcccctaatggtgctagaaaatcatttttattttccaaaaacagaacgaacgatggaccttgcctgaaatatttaacgcttttgctttcttcacttttaatgtaacatgttatcgtatatgcatatagtttacaacaaaaagccgaagtaacaaaagatcggtatgcaaatgtgacgtgtacaggcaaggagaagtttcatgatggatctgcaaaagaaattagagcaaaaaaacatcaaacaatttcaagaagatttaatttcttggtatgagcaagaaaaacgggatctgccttggcgctcagacagcgacccttataaggtgtgggtgtcggaagtaatgcttcagcagacgagagtggacacggtgattccttacttcaacaactttatcgaaaagtttccgaccgtggaagcgctcgctgaagccgacgaagaaaaagtgcttaaagcctgggaaggactgggatactattcaagggttcggaacttgcagagcgctgtcagggaagttcacgaacgatacgggggtgtggtccctccttcaaaagaggaattcggcagcttaaaaggcgtcggcccttatacaagaggcgcggtgctgagcatcgcctacaatcagccggtccccgcggtagacggaaatgtcatgcgggtcatgtcacggattctttccgtatgggatgatattgcaaagcctaaaaccaaaaccctgtttgaaaaaattgtcgaagcgtttatttctgaggaaaaaccgtccgagtttaaccaggggctgatggagctgggcgctgtcatctgtacgccgaaatcgccatcatgccttctctgcccggtccgagagcactgttctgcttttgcagaaggctgtgaaaaagagcttccggttaaaagcaaaaagaaaaaaccttcggtaaaaacccttgcagctgtcgtcctgactgatgaagaaggatacatctatatccataaaagaccggcatcaggtcttttggcaaacctttgggaattcccaaacacagaaacgcagaaaggcctgaagtacgagcgcgagcagcttgcggcgtttttgaaagaagaggccggaatagaagctgaaatcggtccgctcgaaggagtcgtagagcatgtgtttacacaccttgtctggaacatttctgtctttttcgggaaaactctcgatcaaccggatgattcatactttaaaaaggtcacgaaagaagagcttgctgaatacgccttcccggtttcgcatcagaaaatatggaatatgtatatgaaataggcagcttgactgtgcatgctgcccgttagtcgtactggatggtggtgccgtgcgtataatcggcttcctggcggcacagtccgcctcttgcttgaatttctttcacaacctccaggtactcggcatgcccttcttcattgagaaatggcatgatttgctggaaggcgcggtgaaaatagagaagctccgcatctttccactcgtttttcggcgtgtggtcgagctcgctcatatcgcgtcctacgtacataaggcgaatgcctcctttttgatcgtgttatgagctattttttatcagattttcaatcactatactaggagatgaatgacagatggaacaaagaaaatgtgcccttattacaggaagcagccgcggcgtcggcaaagcagcagcgctgaggtttgccgaaaacggctacaatatcgtcatcaactatgctagaagcaaaaaagcggcccttgagacggctgaagaaatcgaaaagctcggtgtcaaagcattggtcgtcaaggcgaatgtcggacagccggcgaaaataaaagatatgtttcagcaaatcgaggaggcgttcggcagactggacgtgttcgtcaacaatgctgcatccggcgtattgcgccctgtcatggagcttgaggaaagccattgggactggacgatgaacatcaatgcgaaagctctgctattctgcgcgcaggaagcggcaaagctgatggagaaaacgggaggcggccacattgtcagcatcagctcgctcggttcaatccgttatttggaaaactatacgacagtaggcgtttcaaaagctgcgcttgaatcattgacgagatatcttgccgtagagcttgcgcagaaaaacatcatcgttaatgcggtttcgggaggcgcgattgatacagacgccctgaagcattttccgaaccgcgaagagcttctggaagatgcccggcaaaatacgcctgccggccgcatggtagagatcagcgacatggtcgatgcggtggaatttttaacgtcagggaaagcggacatgatccgcggacagacgatcattattgacggcggccgttcactgctcgtataaatttttcgcgttcaatgaataggatatcaccctcctgcacaatctaatggtcgtggaggtgatatacaatggctaaccaacaatccaaaacaaacgcacaaaaagtaagacaacaaaaccaagcttctgcacaaggtggtcagttcggcactgaatttgccagcgaaactgacgcgcagcaagtaagacaaaataaccaacaagctgagcaaaaaaaacagcaaaacagctaatcactgaaacaggaaaaagcacttcaccatcggatgaggtgcttttttctttttgttccgacaaaacttccgaatcttagccagaatcagtcaaaggacatccggcatgtatagagaaatgatacttaggcaataaatggagtagagcatagaatggaggatcccgaatgccggaatttgaaaatttggttcaggggcagatggagattatggataagctgttgtatctgcaagcggagattgaaagatgccagaaaattgaaaaagaactggctgcccttgaaaagaaagcccagcttttatcgatccgggaagatatatcccagaagcggaaagatcttgctcagattcaggatttgttccaaaagcagacggagcaggtgattcaggcttatcaaagaatcgaggcatgagcctctctttatcgtttcttagaaaagagccattcctgttcgggagtggctcttttattttcattttttattttcaaacgttataataaataaaagaactgtcggacaggcgatgtgacacactgacttgtaaggcttttgcaaagaaagtaggggagaaaacatgggctttcccaaggaaggagaaaccattcaaattcatagctataagcacaatgggcagattcatcggatttggaacgaaacaacgattttaaaagcaacggaattgtgcatcatcggcgccaatgaccggacaatggtcacggaatctgacggccggacatggatgacgcgagagcccgccatttgttatttccatgcaaagcagtggtttaacgtcatcggcatgcttcgtgaagacgggatttattactattgcaacatcagctcgccgtttgctttggacgatgaagccatcaaatacatcgactatgatttagatgtaaaggtcttcccggatatgacgtatcatattcttgatgaagatgagtacgcggatcataaaaaggcgatgaattatccgaaggaaatcgacggcattttaaggtaccacttaaatacgctgctgcattggatacaccaaagaaaaggcccgtttgcatctgaatttattgatatttggtatgaacggtatttgcattatacaaaataatcctaaaaaacctgttgaggccaacaggttttttgcggtgtactcacacatcaagatatagaggggggaagacgtgtgggggtaatcagaaggtacatggaatttgtgaagccgtataaatggaaaatcgttttgacggttttaatcggtattattaaattttctattccgctggtcatcccgcttctgctgaaatacgtcgtggacgacatcatccaggggagcgggactgctgaggaaaaaacatccacattattcatggtaatggcggttatgttcgccatttttttggtgcttcggccgcctgtcgaatattaccgtcagtatttcgcgcagtggacggcaagcaaggtgctttatgatatcagggacaagctttttgcgcatatacaaaagctgagcctcaggtattatgcgaacacccgcgcaggagaaattatttcaagggtcatcaatgatgtcgagcagacgaaggaattcgtcatcatcggattgatgaatgtatggcttgacgtgatgacgatttttatcgccatcgccattatgatgacgatggacgtgaagctgacgcttatttcgatcgtgctgtttccgctttacggactgtctgttaaattcttctacggcaggctcagaaagctgacgagagaacgttcccaagcgctggccgaagtgcagggccatcttcatgaaagggttcagggaatgcctgtcatcaggagttttgcgatcgaggattatgaacaaaagcaatttgatcacgagaacgggaattttctcggtaaagcaatccgccatacggcctggaatgccaaaacctttgccgtcgtcaatacggttacagacctcgctccgctgatcatcattacggttgcaggttatcatgtgattcacgggaaccttactgtaggaacgatggtggcgtttttcggatatatcgaacgcctctacaacccgctgcgccgcctgatcaattcctcgacaacattgacgcagtcgatcgcatcaatggacaggctgtttgaatttattgatgaaccgtatgatttaaaagataagcccaatgctgtaaaagcagagcgattaaaagggattgttgaatttaaaaacgtttcctttcaatacgaaaaatcggaggaaatgattttgcaggatctttctttgaaagccgaacggggcgaaacggttgcgctcgtcgggatgagcggaggcggcaaatcgacgcttgtcagcctcattccgagattctacgatgtctcagccggaagcctggagatcgacggcatcgatgtgcgcgattatgaggcgcgaagccttagaaaccaaatcggcatggttctccaggatacgtttttattcagcgaatcggtacgcgaaaacatatcgatcgggaatcccgaagcttcgatggaagacatcattgaagcggcaaaagctgcgaatgcccatgattttattatggagctgccgcaaggctatgatacaaaggtcggagaaaggggagtcaagctgtccggaggccaaaaacagcggatatcaatcgccagggtgttcctgaagaacccgccgctcttaattttggatgaagcgacgtcagcgcttgaccttgaaagcgagcactatatccaggaagcgatggaaaagctcgcgaaagaccggacgacctttatcgttgctcacagactgtcgacgattacccacgctgacaaaatcgttgtcatcgaaaacggacgtgtcgcggaaatcggcacacatgacgaactaatgagccgcgacgggcactataagcatttattcaccattcaaaaattaaactaaaaccgcaaaaagcctgactttcgtttgaagctgaacggatgtcaggctttttctttccccgcaaatttcgtacatatttcctatctcgtttaaatacaatttaaaaaatacaagctccggaggtgtataagtgacaaaagaaaaattgcttgaagtatcggatttatcgatttcgtttcaaaagaaaaagtccgaaaccccgattgtgcaaggcgtttctttcgatctccatcccggagaaatcatgggagtcgtcggagagtccggctgcggcaaaagcgtcacctctttggctttaatggggctgaacgcaaacacccggacgacgggccggatcaagtttcaaaacaaagaccttctcatgcagtctgaaaaagaatggagacagatgcgcggcaatgacatcgcgatggtttttcaagagccgatgacctccctaaatcccctttttacaattggcgatcaactaacagaagcactctccagccataccaatattcataaaaaagaagcaagaagaaaagccgttcaaatgctggataccgtcggcctgccgaggacggaccagctgatgaagcaatatccccacgaactgtcgggaggcatgaggcagcgggtcatgatcgcaatggcattaatttgcgaaccgaaactgctgattgccgatgaaccgacaacagctctcgacgtcaccatccaggctcagattctgtcccttttgaaaaaaatgaatgccgaatttaacacagccattctccttattacccatgaccttggcgtcgttcacaatacatgtgaacgcgtgatgatcatgtatgccgggcggatcgttgaagaaggcggtgtcaccgctgtttttgacagcccgaaacacccctatacaaaaggcttgttcgcctctattccggcattcacaggcaaatccgagcgtctgtcttcgattgaggggcaggtgccgaaaccggggtcgataaaaaaaggctgtatgtttgcgccgaggtgccctcataaacgcgaacgctgcgtagaggaggagcccggattgaacaggctggcggatgaccatgctgtaagctgctttctctacgaagaggaaggtgctttcacatgaatcatgaactgctgaacgtccaagagctgaaaacgtattaccgcgtgtcccgcaagaaaatcgtcaaagcggtcgatgatgttacactgtcagtcaaaaaaggcgaaatcgtagggatcgtcggggaatccggctgcggaaaatcaaccttgggaaaatcgatactgcggctgaccgaaccgacttctggaaaggtgacgtttctcgggcgggagatgaccggccttgatgcaaaacagcttcgcaacatgagaaggcatatacaaatgatttttcaagatccgtacgcttcattgaatccgcgcatgaaaataaaagatattttggaggaaccgctgatcgttcataaactcggaacgaaggcggaaaggagagaagtcgttcgctcgatgcttgaaattgtcggtcttgatgcttcatacggcgaccgatatgcacaccaattcagcggcggccagaggcaaaggatcggtattgcaaaagcgctgatcacaaagccgaaattaatcattgccgatgagcctgtttccgcgcttgatgtatccgttcaggcgcagatcttaaatctgctgtctgatctgcagaaggcattcaatttaacgtttctgtttatttcgcatgatctcggggtcgtccgctatatcagcgacagggtagccgtgatgtatttcggaaagattgtcgagatggcggacgccgactctttatttagagaaccgaaacacccctatacagaaacactgttagcggcagtacccgtcatcggcaaaggagaggcggttcatacggcgccggatattgccgcgccccgcatgagtgaaaagggctgtcctttttacagccgatgcatgaagcgggcggacgtctgccttgaagcggagccgcttcttgaagagactgcggacgggcattatgctgcatgccattttaccaataaggaggctgtacgatgaaaaagaaaagctggctgatctgtttgggaatgattctgtctgtttccgcttttttaatgggatgctccggtaacgaaagcggaaagaacgacggagggacgaacggcggaaaagatacgctgatcatcggcagaggaggtgattcgacatcgcttgatccgatcacaacgacagaaggcgaagcgtttaaagtgacgatcaatatgtttgagaccttgctgaattacggggaacaagacacaacgctgaaggaaggcctcgcggtgaaatgggacgcttcagatgacggtttgacctacacattggagctgagaaaaggcgtgaaattccatgatggaacggattttaatgcagaagccgtcaaatacaattttgagcggtggatgaacggggatgaagaaaaatttccttactacggcatgttcggaggctataagaaagatgaggggcacgtcatcaaagacataaaagttctcgacgaccataagattcagttcattttaaaacgcccgcaagcgccgtttttaaagaaccttgccatgacttctttcgggattgcaagtcctgccgccattgaaaaatacggcgaaaaattcagggagcaccccgtcggcactggcccttacaaatttgtcgaatggaagccgaacgaccggatcgtccttgagaaaaatgaagactattgggatcaaggcaaaccgaaattgcagaagatcattttcagagccattcctgaaaactcagcccgcttaaatgcattgaagacgggcgaaatcgacctaatggatggcgtcaatccgtctgatatcgaaagcatcaaagcagacgccaatctgaaaatatttgaaaggccttcaatgaacgtcgggtatctcggaatgacaacgacgagaaagccatttgacaataagctggtccgccaggcgctgaaccatgctgtcgataaacaggcgattatcgactccttctacggaggtctcgctgaatctgcaaaaaacccgcttcctccgtcgctcgaagggtacaacgaccaggttaaggaatatccgtatgatttaaaaaaggcaaaagaactcttaaaagaagccggctacccggacgggtttaaaatgaagctttgggcaatgccggtaccgcggccgtatatgccggacggtatgaaaatagccgaagtgattcaatcaagctttgaaaaaatcggagtcaaagcggaaatcgtcacttacgactgggcgacgtacttggataaggtgagcaaaggggaagctgatgcgtttttaatgggctggaccggcgacaacggagatccggacaacttcatttatacgctgcttgataaagataatatcggcggtaacaactatacgtacttcagcaatgatgagcttcatgacatcttaatcgaggcgcagtcagaccctgatcaaaagaaaagaaataaactgtatcaagatgcgcaggagctcctccatgaagaatcgccttgggttccgcttgtccattccacgccgattttggccggttcaaaagatatcgacggatatgttccgcacccgacagggagtgaagtattgtccggcgtagagtttaaataggtggtgacagccattgcttgcgtactgtttaaaacgaacggccatgctgatccccgttctcatcggcatgacattggtcgttttttcgatcatccgctttattcccggcaaccccgcccaggttattctcggccagagggcgacaaaggaagcggtgcagcagctgaccgtccagctcggccttgatcagccgtggtatatgcaatatgccagatatataggggatttgctgaaaggggatctcgggacatcaatccgcacgggagcggcgattacgcaagaaataaagccatatttgttcgccactctcgaacttgcctttttcgcgatgctgatcgcagtgtttgtcggcgtgaatgccggaatcatcagcgcgtggtttaagaactcggtattcgactatatcgcgatgctggtggctttaatcggcgtgtcgatgccgattttttggctcggtttgatgggccagtggtttttttcgatcgagctcggctggctgccgacaacaggaagggagaatgtcagaaatccggtcgaagccattacgtacattcatacattggacacccttttgcacggaagatttgatcagtttgcagaagccatccgccatttaattctgccgggaacggctcttgccaccattcccgcagcgatcattgcgagaattacgagagccagcatgatagaggtgctgcagtccgattatatccgcacggcaaaagcaaaaggcgtgcatatgtttttcgtcatctataagcacggtttaaaaaatgcattcattccggtattgaccgtcatcggcctgcaaaccggactgttactgggcggcgcaattttaacagagactatttttgcctggcccggcatcggccggtacatttatgatgcgatcagctaccgcgactacccggttatccaatcgggcatcctcgtgatcgccttcatcttcgtcatgattaacttcatcgttgatctgctgtacgccgtcatcgatccgagaattaaatattaggaggcgggaaacatggttgtgcttcaaaatgaacagcagagggaggacgtgaaggtgcgttcgcctttggcggaacatattcggcggttttttgagcataaattggctgccgccggcacgattctagtcgcgctgtttatcctgctagccatcttcgcgccgctcatcgcaccatacggaataaacgaccagtcactgtcagacaggctcgccgctccgtctgcggaacacctttttggcacggatgactttggcagggatattttctctagggtgctttacggcgcaaggctgtctttatgggtcggctttttctcctgtttggcatcggccttggcggggacgctgctagggctgatcgccggtttttacggcagatgggctgatgcattgatttcacggctgtttgatatcatgctcgcgtttccgagcattctgctggcgatcgccattgtagcgattctggggccttctcttgaaaatgccctgattgccatcgccatcatcaacgttccgacgtttggcaggctcgttcgttcaaaagtgctcagcatcaggcaggaggagtatatcttatcagcgcgtgctgtcgggatgtccaatataaggctgatgtttaaacacattctccccaacagcatggccccggttatcgttcaagcgacgctgaatattggaaccgcgattatagaagcggccgcgctcggatttttagggttgggggcgcaggcgccgaaccccgagtggggaaaaatgcttgcggatgccaggccttacttggcgcaggctccatggacattgttttttccgggatttgcgatcatgctgaccgttctcggctttaatctgatgggagacggcctgcgcgacacccttgatccgaaaatgaaggaaggaaaataaaaaaccggttaacatattcgttaaccggtttattcttcctcaacttcaagctcgctgtcttttttgtggtacgtctgaaagcttgagagcaaggtttccaaatgctcaagctgttctcggtattctacagtgctcgccataatggtcagcatattgtagtccaacagttcttcttttaatttgtcctggtttttcaggaatgattcggtcaagtgctgtttgtacacgtctccttcttcgtgcaggtcgacgtgatcctgcgttttgatcctgccgacgaatctcattaaaattcgttcgtgccaatggaggagataatcgagctcttcgaccagcgtttcttgaaattcttcaggcatgtgataaaactcgttttcaagccggtgcagctttttcagggcatcaagcgcacggttggatgcaatgatcgcctgtctgaacagcacgagctttcgctgttttacatatgtggaacgttttaaatagcttctttcttctttgtagagcaagtaaaggtggtcaaccttcatcattttttctttcagtttttcaatgtcttctttcagcatggaatgttccgttgtcttccgcgtcaacaatctgatccatttaatgacttcatctgtattttcaacaatatggctgacgagcttcgtttcatatttaggcggcagaaaaatcaggttgaccaagaacgcagacaacacgcccaaaataaccgttccggttctcaccaaagcaaaccataaaaagttgtcgccggagctctccagtatggcaataacggtgacaagagcgatcgaaatcgtgttctcgatcttcagcttcaagttgatcgtaatgacgattaccgccgtcaatccgatgatgatcggactgggttcaaaaataagtccaaaaataatggctgtggctgctccgataatgttcgcctgcacttgatcgacaatcgtcaaaaatgaacgatagatcgaaggctggatcgcgaagatagccgcgattcccgcgaagacaggagtcggaaggccgagccaagacgcgaggtaaagcgcaagcgtaatggcaatgcctgttttgaaaatacgggcaccaagtttcattaggctgtacttgcatccctttctataataaaattcgttctttacagaaaatgaattgtagtgaacattccctctctgttaatttgccaaacaataaagtaatatacagcgatcttccgaaatattcaacccatttttaagaaaaaacaaatcattgacaaaaaagaaaaacaagccggcggaaagtgcctgttcaccgcgctttcaaagtgctccgcatttgataaaaaagagagcggatccgctctctttttacatgcgctgtttcaattgtttaaatgagtcatccacggctttgagcgtatctttaatgtcctcttccgtgtgcgcggtggtgataaaccatgcttcatattttgaaggcgcaagattgattccgcgctcaagcatcagtttgaaaaaggccgcgaacatgtctccgtccgtattttcggcttgctcatagttttcgactttttcgttcgtgaagtatacggtgagcgcgccttttagacggttgacagtgatgtcgatgccgtgggtctcggcatgtgccaggatgccttcttcaagcatggcgccgaggcggtcaagtttttcgtatgtgcctttttctttcagcacttcaaggcaggcgatgccagagaggatggaagccggattccccgccatcgtgcccgcttgataagcaggtccgagcggtgcgacttgttccataatctcttttctgcctccgtaggcgccgatcggcaggccgccgccgatgattttgccgagcgccgtcaaatcaggtttgacgccaagaagatcctgggcgccgccgtacataaagcggaaagcggtaatgacttcatcgtagatgaccagggctcccgccttatgtgtcagttcattgacctgctcgaggaatccgctcttcggttcgacgatcccgaagtttccgacaatcggttcaacgaggactgccgcaatatcgttcccccatttatcgagcgcttctttatagctgtcgatatcattgaaaggaacggtaatcacctcgttggcgatgctttttggaaccccggcggaatcaggcgtgccgagcgttgacggtcctgaaccggccgccaccagcacaagatcggaatggccgtggtagcagccggcgaacttgatgattttcgttctgcctgtataggcccgggcgacgcgaatcgtcgtcatcacagcttccgttcccgaattgacgaatctcactttatccaaggcaggaatcgcttccttaagcatcttggcaaatgtcacttcatgctttgtcggcgtaccgtaaagcaccccgttctcagcagctgtttgaatcgctttcgtgatatgcgggtgggcgtggcccgtaataatcggtccgtacgcggcaaggtagtctatgtatttgttgccgtccacatcccaaaaataagcgccgcttcccctttccatcgcgacgggagaacctccgccgaccgctttgtaagaccttgaggggctgttgacgcctccgactatatgttgaagagcttcttcatgaagcttttcagattgagtatgctgcataatatcctcctcatttttgcacctttatctatttctatattttctatattgtaacacgaggcggacagagcgcaaaaaagaagccgccgaacatttgaacaagagggcgctgttttttataatgggggaaagcaagcgattaaacataacaggaggcaaaacaatgactgttgaaattggacaaaaggtgcctgatattgaactgctgggcgatcacggagaaaaagtaaagctgtcggattttgaaggaaagtatgtcgtgctctatttttacccgaaagatatgacgccgggatgcacaacggaagcgtgcgatttcagagaccgtcatgaaagctttgcggaacttgatgccgtcattatcggagtcagccccgacgatcaggcaaggcatgaaaaattcaagcaaaaacacgatctgccgtttctgctgctcgtcgatgatgaacacaagctcgctgaaagctttgacgtatggaagctgaagaagaatttcggcaaggaatacatgggtgtcgaacggtcgacattcctgattgataaagaaggccgccttgtgaaagagtggcggaaagtaaaggtaaaagaccatgtcgcagaagcgcttcaagcagtaaaagaaatcgcggaagcataaagctcgctggggaggccggactgtattttagtttggtctctttttacgctcatattcgcctgtctgatcggccatgctgatcatagcggcatttttcgccttaaaaatagctttttcacagggattggaattgacaaagattctgatcaggagttacactaattataaacgttataatgtaagaattttttttagaagagaggtgcatgacgatggctgaacataacctgaaagaagcgttggaagcgttgaaggaaaccggggtgcgaattactcctcaacgtcatgccattctggaatttctcgtgaattctatgtctcatccaactgcagatgatatatataaagctctggaagggaaatttccaaacatgagcgtagcaacggtctacaacaatttgcgggtttttaaggaatcagggctcgttaaggaattaacgtacggagattcctccagccggtttgacttcgtgacttccgagcattatcacgcaatttgcgaacgctgcgggaaaatcgtcgactttcattatcccggcctcgacgaagtggagcagcttgcttcacatgtgacaggatttaaagtcagtcaccatagactggagatatacggtttatgtcaggaatgcgacaaaaaagaaagccattaaaaagagctggccgcttttttaacggtcagcttatttttgttgcagcatttactgagactttcgattatacgattcgttaaactcttttccttcgaggtttttgtccaatgtcaaaggctccctgcaatgcatgcacatatcaacccggcctaaaatcttggtcggtttttcacagtttggacagacgacttgaaccgctttcgttgaaagcatgccgatccaaaaataaaccgctgtgctcaacaagatagacaatacccccaagatcataaacaccgacatcaagaggaccgaggacctaaaaaagaccccgacatacataataatgaagcctataaatacaaggctcaacgcaaacgttctgattttgttgattttactagagtatttggccatatccatccccctgtctctaatatagcatatcaaagatgtgttattctttaattaaaacgaatcaattggaaaatttctatagagagttttggggaaattgattataataattcaatgtgttttcaaaataaaggagtttttattggctcgtagaaataggtagaaacaagagagaagcttttatgcaacgtatttacatcgtattggaggaatggtgatggaaaatcttctccgtccgatttaccaagaaagagcaagccgccctgacacactcgctgtcatgctgattgagaggagaaatcaaacttcatctgcaacagataattttgatgcggcattgttgattatcgttaataaggctgaagaccctgtattcgtgaagcattatgagttcgacggaaaaacggcttctcttcatattatttctgttgaacagcttcaggaatggattctgcttggaacaaacaggagaatcatagactgggttctcaatggaaaggtgcttttcgaccgaaacgaatttatcgccaagctgattgagcagctcaatacatttccgttttcagaaagaaaactaaaaatcggacttgaatacgggaaattaatcagaagatatatagaaggaaaatcgttttttgaggacggtcaatttttggatgcctacaattccatcgtacacgccctccaccatttggccagaatcgaagtgatcgataaggggtttcaccctgaagttacggtatggaaccaagtccgccacatggaacctcaggtttataaattgtataaggaattaattgaaagcaatgaaagcttgcaaaaacggctggagttattattcctcgcaagcgattttctcattcattcaaaagccgaaataggggctgcctatattctcaatgtcatggatgaaaaatcggtttggcaatttgccgaacttcttaaacatccggatctcaagtatttcacgacagacctgggagttatactggagttcttggctgaaaaggatttagtcggagtaaagccgatagagacaaagggccaaaagatttttcaccgaggatattttattaaaaaaagtgttgacactaatttataacggtgatatattattaagcgtcgctgttagcggaacggtttttgaacagaaagcagcagcgacgaaaaatcaaaaaacatttgacacttctcgttgaaaatgttatactaataaagtcgcttcggacagaagcggaaatgatctttgaaaactaaacaagacaaaacgacgtacctgttaattcaataaataaatcgtacatgcgaatgtgcgtagtcaggggcctgcacgatgcaggtcatgcagatgttgtcacaggatgtgacgaacttaatctgcgctccattacttcatggagagtttgatcctggctcaggacgaacgctggcggcgtgcctaatacatgcaagtcgagcggaccgacgggagcttgctcccttaggtcagcggcggacgggtgagtaacacgtgggtaacctgcctgtaagactgggataactccgggaaaccggggctaataccggatgcttgattgaaccgcatggttcaattataaaaggtggctttcagctaccacttacagatggacccgcggcgcattagctagttggtgaggtaacggctcaccaaggcgacgatgcgtagccgacctgagagggtgatcggccacactgggactgagacacggcccagactcctacgggaggcagcagtagggaatcttccgcaatggacgaaagtctgacggagcaacgccgcgtgagtgatgaaggttttcggatcgtaaaactctgttgttagggaagaacaagtaccgttcgaatagggcggtaccttgacggtacctaaccagaaagccacggctaactacgtgccagcagccgcggtaatacgtaggtggcaagcgttgtccggaattattgggcgtaaagcgcgcgcaggcggtttcttaagtctgatgtgaaagcccccggctcaaccggggagggtcattggaaactggggaacttgagtgcagaagaggagagtggaattccacgtgtagcggtgaaatgcgtagagatgtggaggaacaccagtggcgaaggcgactctctggtctgtaactgacgctgaggcgcgaaagcgtggggagcgaacaggattagataccctggtagtccacgccgtaaacgatgagtgctaagtgttagagggtttccgccctttagtgctgcagcaaacgcattaagcactccgcctggggagtacggtcgcaagactgaaactcaaaggaattgacgggggcccgcacaagcggtggagcatgtggtttaattcgaagcaacgcgaagaaccttaccaggtcttgacatcctctgacaaccctagagatagggcttccccttcgggggcagagtgacaggtggtgcatggttgtcgtcagctcgtgtcgtgagatgttgggttaagtcccgcaacgagcgcaacccttgatcttagttgccagcattcagttgggcactctaaggtgactgccggtgacaaaccggaggaaggtggggatgacgtcaaatcatcatgccccttatgacctgggctacacacgtgctacaatgggcagaacaaagggcagcgaagccgcgaggctaagccaatcccacaaatctgttctcagttcggatcgcagtctgcaactcgactgcgtgaagctggaatcgctagtaatcgcggatcagcatgccgcggtgaatacgttcccgggccttgtacacaccgcccgtcacaccacgagagtttgtaacacccgaagtcggtgaggtaaccttttggagccagccgccgaaggtgggacagatgattggggtgaagtcgtaacaaggtagccgtatcggaaggtgcggctggatcacctcctttctaaggatattatacggaatataagaccttgcggtcttatagacaggtgcgtttggatcttgtttagttttgaaggatcattccttcaaagcgtgttctttgaaaactagataacgaaagtagacattcacattcaattgtaatgcaagatatcacgtagtgattctttttaacggttaagttagaaagggcgcacggtggatgccttggcactaggagccgatgaaggacgggacgaacaccgatatgcttcggggagctgtaagcaagctttgatccggagatttccgaatggggaaacccactgctcgtaatggagcagtatccatatctgaattcataggatatgagaaggcagacccggggaactgaaacatctaagtacccggaggaagagaaagcaaatgcgattccctgagtagcggcgagcgaaacgggaacagccccaaaccaagaggcttgcctcttggggttgtaggacactctgtacggagttgcaaaagaacgaggtagatgaagaggtctggaaaggcccgccataggaggtaacagccctgtagtcaaaacttcgttctctcctgagtggatcctgagtacggcggaacacgtgaaattccgtcggaatccgggaggaccatctcccaaggctaaatactccctagtgaccgatagtgaaccagtaccgtgagggaaaggtgaaaagcaccccggaaggggagtgaaagagatcctgaaaccgtgtgcctacaagtagtcagagcccgttaacgggtgatggcgtgccttttgtagaatgaaccggcgagttacgatcccgtgcaaggttaagtttgaaaagacggagccgcagcgaaagcgagtctgaatagggcgcatgagtacgtggtcgtagacccgaaaccaggtgatctacccatgtccagggtgaagttcaggtaacactgaatggaggcccgaacccacgcacgttgaaaagtgcggggatgaggtgtgggtaggggtgaaaatgccaatcgaacctggagatagctggttctctccgaaatagctttagggctagcctcaaggtaagagtcttggaggtagagcactgattggactaggggcccctaccgggttaccgaattcagtcaaactccgaatgccaaagacttatccttgggagtcagactgcgagtgataagatccgtagtcgaaagggaaacagcccagaccgccagctaaggtcccaaagtatacgttaagtggaaaaggatgtggagttgcttagacaaccaggatgttggcttagaagcagccaccatttaaagagtgcgtaatagctcactggtcgagtgactctgcgccgaaaatgtaccggggctaaacgtatcaccgaagctgcggactgttcttgcgaacagtggtaggagagcgttctaagggctgtgaagcgagaccggaaggactcgtggagcgcttagaagtgagaatgccggtatgagtagcgaaagaggggtgagaatcccctccaccgaatgcctaaggtttcctgaggaaggctcgtccgctcagggttagtcgggacctaagccgaggccgaaaggcgtaggcgatggacaacaggttgatattcctgtaccacctcctcaccatttgagcaatggggggacgcaggaggatagggtaagcgcggtattggatatccgcgtccaagcagttaggctgggaaataggcaaatccgtttcccgtaaggctgagctgtgatggcgagcgaaatatagtagcgaagttcctgattccacactgccaagaaaagcctctagcgaggtgagaggtgcccgtaccgcaaaccgacacaggtaggcgaggagagaatcctaaggtgatcgagagaactctcgttaaggaactcggcaaaatgaccccgtaacttcgggagaaggggtgctctgttagggtgcaagcccgagagagccgcagtgaataggcccaggcgactgtttagcaaaaacacaggtctctgcgaagccgtaaggcgaagtataggggctgacgcctgcccggtgctggaaggttaagaggagcgcttagcgtaagcgaaggtgcgaattgaagccccagtaaacggcggccgtaactataacggtcctaaggtagcgaaattccttgtcgggtaagttccgacccgcacgaaaggcgcaacgatctgggcactgtctcaacgagagactcggtgaaattatagtacctgtgaagatgcaggttacccgcgacaggacggaaagaccccgtggagctttactgcagcctgatattgaatgttggtacagcttgtacaggataggtaggagccttggaaaccggagcgccagcttcggtggaggcatcggtgggatactaccctggctgtattgaccttctaacccgctgcccttatcgggcagggagacagtgtcaggtgggcagtttgactggggcggtcgcctcctaaaaggtaacggaggcgcccaaaggttccctcagaatggttggaaatcattcgcagagtgtaaaggcacaagggagcttgactgcgagacctacaagtcgagcagggacgaaagtcgggcttagtgatccggtggttccgcatggaagggccatcgctcaacggataaaagctaccccggggataacaggcttatctcccccaagagtccacatcgacggggaggtttggcacctcgatgtcggctcatcgcatcctggggctgtagtcggtcccaagggttgggctgttcgcccattaaagcggtacgcgagctgggttcagaacgtcgtgagacagttcggtccctatccgtcgcgggcgcaggaaatttgagaggagctgtccttagtacgagaggaccgggatggacgcaccgctggtgtaccagtttgttctgtccaagggcatcgctgggtagctatgtgcggacgggataagtgctgaaagcatctaagcatgaagcccccctcaagatgagatttcccattcctataaggaagtaagatccctgaaagatgatcaggttgataggtctgaggtggaagtgtggcgacacatggagctgacagatactaatcgatcgaggacttaacctaataaaataagtgaacgctggctaaatacgccacatcgtgtggtaacgcctgcatgacccacatcctgtgggcctcgtctgcccgttatctagttttgagagaataatttctcaaaaaatgcacttgcattttttcaaatacatagtataatgatctttgtcactaaattgtctggtgatgatggcgaagaggtcacacccgttcccatgccgaacacggaagttaagctcttcagcgccgatggtagttgggggcttccccctgcgagagtaggacatcgccaggcaggcattattccgcagtagctcagtggtagagctatcggctgttaaccgatcggtcgcaggttcgaatcctgcctgcggagccatttattggagagctgtccgagtggtcgaaggagcacgattggaaatcgtgtaggcggccaacgccgtctcaagggttcgaatcccttgctctccgccactttaaatacatctggcccgttggtcaagtggttaagacaccgccctttcacggcggtaacacgggttcgaatcccgtacgggtcaccattcttttttggacagcacgctgaaaagtatcaggtttacaccaaagctttttaaaggaaggcatgctaagatcgcaacgtcctgctgcaacgcatgcacttgtaggtcctgtacttcggaggattagctcagctgggagagcatctgccttacaagcagagggtcggcggttcgatcccgtcatcctccaccatttctatgaaaatcatattatcgcggggtggagcagttcggtagctcgtcgggctcataacccgaaggtcgcaggttcaaatcctgcccccgcaaccaaattactcattaatggtccggtagttcagttggttagaatgcctgcctgtcacgcaggaggtcgcgggttcgagtcccgtccggaccgccatttaaatagaggctcggtagctcagttggtagagcaacggactgaaaatccgtgtgtcggcggttcgattccgtcccgagccaccatttgccggtctagctcaattggtagagcaactgacttgtaatcagtaggttgggggttcaagtcctctggccggcactgttttggaggggtagcgaagtggctaaacgcggcggactgtaaatccgctccctcagggttcggcggttcgaatccgtccccctccaccatgtttttaggggcatagtttaacggtagaacagaggtctccaaaacctccggtgtgggttcgattcctactgcccctgccaattttaattcacaatttatggcggttgtggcgaagtggttaacgcaccagattgtggctctggcactcgtgggttcgattcccatcaatcgcccttaatattgggctatagccaagcggtaaggcaacggactttgactccgtcatgcgctggttcgaatccagctagcccagttttcatctttctttatcatcctgcatatgataagatgaatattagttaaaatgcggaagtagttcagtggtagaacaccaccttgccaaggtgggggtcgcgggttcgaatcccgtcttccgctccaaatcttaaatgatggcggcatagccaagtggtaaggcagaggtctgcaaaacctttatccccggttcgaatccgggtgtcgccttatttcccgtgccggggtggtggaattggcagacacacaggacttaaaatcctgcggtaggtgactaccgtgccggttcaagtccggccctcggcaccattgatcacacacatgccggtgtggcggaattggcagacgcgcacgactcaaaatcgtgttccttcgggagtgtcggttcgaccccgaccaccggtatcactaaacatcgtattgccaaacgatgaaagagcgttcctacaaaaggagcgctctttttatttattccttatcttggaacgaagccgtaagaattttttcttaaggactgcgagctccggaagctacgggaacataccgtgagatttatcgaaatgagcttaatacggtgcagaaatttttacaaaagcaaaaatatatctgatgatttattatctatttatagggcgaaaagtaaattattgatacaaacttctttgcaaagattggtaactttctgtaaaatgttctcatagcgatagaggcagtaaagtgggaggtttgacaatgaaaacagtagcctctgtgaacgtagccaatctcatcaatcagtggtatgttcacataaaaaagagagatgtttcaaatgccgtagaacttagggacagaataaaaggccttttaaacgtaatggaagaagatcaggatgttttgctttactttaatctacttgattacaggttcagagtattaatggaagacgtcgcgggggagccgcagcttccgcctattgctgaagataaggcgaagacagacggtttgttacgatactattactttctctttaaaggaatgtatgaaagtgcgaggagcaactactctaaagcgcttaattgttttagagttgccgagcggcagctcgataatgtcgaagatgaaatcgaaaaggccgagtttcattataagcttggaaatctctattattttacgaaaacaactctactttcttttcatcatctttcaatcgcgaagagcatttatagggcttatgaagaatataagacacagtcgataaactgtacggtgctgctcgcactcaattatatagacgacggacgtttaacaagagctgaaaatatgcttaagagttgcgcagaaagactgatcaagatgggcgataatcatctgctggcggctgtctactatgctctcggctttttaaaaattcaagaggataaacatgaagaagcactcgagtatttcgacctctcatttaaaacggatgatatcgaaaaaaatgcgcctattatgtacatgcagtgcatatacgagtcagctaggtcaacttataagataggtgaggttgataaggcgcttaagtgggttcatcttggttttgagtttgctcagaaaacggataatatcaacttttcgctcaaattctcgattctaaatatatgctatagcgctcccatcgagggtgtaccgcaagtaaaagagtttatcgaaatgctcgaggagagagaggcttacgtagacattgaggcgcttgctgaggatgtggccaacgtctacagctcattaaataattacaaatattccacataattcttggaaaaagcaataaaatcaagtaaactaacaggaaaggaggttctttaaatgaaaaaacttattgtaactgctttccttactgcatcgcttggactcgttttaaccagcgcagcagacttcctcgcagaaagtatccaaacagcagactcagtaacattacttgcctcaagaggagcgggctcataaaacaaaaatacaacagtaagagggcggctattacagccgtcttttttatgatttcagttttcttggtaacttgaatgctatactatagttatatctaaaatgcgaagttaacgctatgctagaccgtaatggcttattatatcgaatataccgcgggctagggctttccgatagaatcggcacgactcaaattcgtgttccttcgagagtgtcggttgaccccgaccaccggaatccttagctctttttaaagaattggatagaaaacgttatgatttgaaatggttttgcacattctttacacatacacatcctcaacttcttcaggcttttcaacttactcaacagcctatcttcaaaaatgtttactgtctcagtttcatctctttcccgaagctctttaattaagtgagcatatgtatttgacgtggtttctatatcagcatgtcctaatttcacttacataataaattgacacctttctataaagctgcacgcttgtgagtgtgccttaatccatgaattgtagtcggttgaaatactcaatttcgctagtacgccattctatattcgggattcaaacggtgaaattggtatcgcgcgccggcaatgtacaagtgaatataaaatacagcctgtaaacagggaaattagcttgttgcttggctacaagctaaggcagctcataaaagaagtagtacatctttgtaaagggatcagcactgacgagactcaaagagttaagccgagtcgggaatgctggcagatagctgagcatccactggttgatgtggctttcatagatcgatcgcgctacatcacttatgttgaacgcgaggggtttataacacatgcaaaatctaattgtatcggctgtcctttccatgttttcaatacatggcaaaatatgaatataaaagatccagtttcatggaatgacgcggtggaaatagattgactcatcaggcggctcccgcactttaaaaataatgcttttcttcataagtccgggaagacggtggaggaagttgatttcaacgagaattagctcaacattgatcactttttgaatgaatttgaggggatgttggtgttgatcgaatacagctgacgtgagtaaaaaggcctgctgttccaactatgggtgcagcaaggggcattgaggaggatatcatatcttgataaaattagtaggataaagaaaaagaaggtgttaataagtgaatcttttggaaatctttaatgaattattgagttcttttggagttccgaccgttgttatttttttattttatttataataacagcttttagagtattccagccgatactttgttttcttcagttgtttttgaacaaaagcttttttcaaaggaaagaatgttcattgtcagagcatgtatgtatgtggtttatacgtttgcttggatggtcatttttgtatctttaggtgagacattaaaaaaaagtttaatttggattataacgaaaatttgtctgtacggctgaaatattaattgcagtaaacgtctttgttcttttaactttgaatctagtaaaaaaaccagagcatactttatttaaaataaagtctaatagatacttcaaatttttcatgacttgttcatatttgatttttttattcattttttatactgagatatatttgttgctttctttttctcagtttaatgatgttaaatctttaactgttgggatagtaatgtattttattgcttgtgctcagttcctatcttttcaacaattgtattaaatacggttgactagtcaactaagaaaaatgtattcatagaggatgaaaataatcaagtttggtatatattgcatccaatcaataaggaagtcattttattgggaaacgaatctgagcctacgctgtgtaatgaaattagaggaactatataaagtacccattaagattgagaaaattaataattaagtccaagatggaatgcctgcggacactgaacttacagcttttacgctgtttgtttggtgtccgttttttatttgtcatgcatgtggttttagtgaaaggagaagcagacatgaaacccaataaaagaaaaccaccttgaaaaaacgcaggagcactctgagcgcttttggcgagagattacggacaaaaacaagcaaattcttaaaagaggcaaaggcggcgcttaattacagagtggttcttctgcaagtaccagatgatcttctgccgaaagtcacggcgggctttaaccatttcctcgcgctgcaagctcgtgattcctaaaaaggatgacgacaagccgaaatcaaaagaggaagagcggttcgtgggccggatgtaatgcaagaggtcacctctgaaattctgattgagcgttatgggcttagcgaaaaaatactttccggtgagataaaggcttgtcaaaagcataaatgggctgtgcagcgattttttaaagatgtcgaggtgttagcggacccggattgcccctattattttgatgctgaagcggtgctggatttttacgaatgggcgcggcaggttcagacatgttgaggggatgcatcgggtatttattgccggatgctcacgggagcagacagacgaattttaccaggcaatttttgaacaggtattgcgaaatatctcggcctttgtggtggatcaagcaaccggcaacatcggccccgaaaaagaaagcacgaaaaagcaggagcaaaaaagtacccattccgcccggaatttacaaaagcctaattatgaagggaacggccgtccgacagattcaggaggctttagctgccctctatttctatccggacaaaggcgctaaaaataacggcattgatgtctattacggaacgaagacaaaggcgcagctcgagtcgctattggtttaatacaaaaaggccctctttcaagagggcctagattttataaattccaacgtgtcaattgttattcatcactgtctaattcccatattgtgttaccgtctactaagatcttattcggtgtatcttcataaagagaaatttcaactagggagtttttctcttccaatagccaattatatagactatcttcttcattattaacgggaggagataaaaccttatttacttgaaaagccgttgcgtaatattctttataattgatatcatcatcctccagaccgttgtctgtttcgaaaaatgtatcagttttaccaattactcttaatccattttcccattctaatataagttctctatctttgtattttaataatgttttgaataaagaatcaggttccatgtatatcctcttttcctatatttatttaagacggttgtgaaggtactatatgagcgccgttttttccataatgtatcatgcctcttgtagtctcttcatatttacgggtctctgtattatagtattttcctattacttgaccaaaatccactctttctttgtttcctttttttaacatatctcctgtgccagcatatttatcaagcaactcttgcgcttttttattatccccgtagaagatactcttggttctgccatttgcaacttcttgtttataatttggtgttcctggaatatgtttttcttgagctcctggtttaacttttgcagggaaaccatttacttcacggtacggaccttttggtacggattgtttgccataggaaggtgttttatctaccttcgcaactttctttcccgcctcttcacctttaaataacttaaatcctttttttcccgtactttagcaaccgaccaacaggtgttaaagaagttccggacgcagcacgctcgacattagagactttttcacctgtgtccggatctctgcctgttatgacccgaaccgcatcattaccgcccgctatttcttttgcaacaaaatcccctatatcatttactggttctaaaggagttccttcaaaatctcgcttaagattcccttggcttcgactttttggaatacgtttaacagcttccatctctactttaccgtttacaatgtactctcttacgatttgaccattttcatatacatggtaacgcccaccgatatatttaatgtctgccggattttgaaccacttcatcggcgacatcaactgttttgacccttttccatcctttatgattatatagtttaccatcaatgacccgaatatctccataaaccttcggatatttttctgcttcgttttgcaacgcattcaaatcaaaatcgttcgcataaacgtcttgattgatattttctttattgtcttccctaatcaccgtatccacattagatcgtttatttttgttgagcttttcaagcatcatctccatcggagacggttcgacattctccagttggccctgaagtccgccaggtagtccgtttattgtagagttatcatccgactttaaaatcgcgcctttttgataactggtgatttctattttgggaccggtatacattttttcgagccttgcgatgtatctctgcatcgtctcaaggtcgttttcagccgtcttcagggcgttggtttgcccgcggtcaaacgcatggagcttttcaagagtcgtgctgatttcctttaacgctttctgattttgttcatgaaaaccgctgtcattcaaatccggtaaatcgacaatatggctgacttttgcgatcgtggcgttggttttagaaaccaaatgtttcgttgtgcgatcagcggcattcaagccattctccaactcatgcccgagaaaggactgtgaaataaatccgttatggtttggttccagggaattcagcgcgcttttcattttcttcagcgcggaactgtattcctctataaaagtatcatagaactgtagaaaaggggtgtggcattcctcgtaaaaggcgcggatcgcgtcgcccgccttttccctttaaagcatcatcaagtgatgtgatgccctcaacagcctttttgactttggcgattcgtctgattgttgttttaattgttccagcgtttgatctattgcattgtgcagcgcctgaacatcaagagtcttcatggcattctcctctaatccttttggttacaatcagtatagagtttaccactatacggaaaccaattggggaataaatcctgttcatccatgaaaatgaatcttattgatcaggtctataaacctaaatactattgtttttgagaataaaccgatcttgattttttagaagctttaatagcttaaaagatcttaattggttttcgaggatggaaaaccatgatataattaccagtaaagcatttttcaagatccaggaggtccgcccttgtttaatatatattgtgatgagagttgccatttagaaaaggataatagtgatgtaatggtattaggagaaatgaaagttggtgctcgttttcttcctgatatctataatcgcattcgtcaaattaaagttaatcatggtttaagctcttggtttgaagtaaagtggacaaaagtttcaatgagtaaaatagacttttatttagatttaattgattatttttttgatactgcagctttaagttttagaagtgttgtagctacaggaaaaaaagaagttagaccacaatacatataatgaaagtgattatgataattggtactataaaatgtattttcaattgttaaacccattcacgacgttaaccgtgtggcgaataaagtcaaacgattccagctgatgaacgatgttttctgatgggatttacggactaaaaatgaaggctaaattgaaccgttactgaagtaatgaaaaaggccctcttttcacagagagcctactttttaaacgaattcatactgacatatttaatcttgttgctgggggttatactgttttaaccattcttttgcatttccacatgcacttagtatatcgtgatggttaaaacttaataaataatcattgtttttattagtgacatagaattcgacattaaacatttcagataatatctttactacattattccccccatcaattttataggaagatttttcatctgaagggttaaacattagaattgcttcagaatctgcaatataatcggctatccattgccaagcatcttggttttgtacagaaaaatctttctctacaaactcccacaacggaaaatgctttttcccattcgcgtatttattagccaaattatgaaatatgatttctgtatcatttgttgataattcatttaccttaatgtcaactgacttagcggcagttaaaatttgttctttaagatcccacatactaactcctccaaaattatctgtttatagggactgagtctactaaaatatgacctctaattgctcctccgccacctcttttcccagcggtttgatatccagtgtgaggaacatccgggccgtttttggtatggccaacatctatattaacttccgccccatttttagatctccattcaacagggaatgattttccattttcgtcttttccccattttgtaactttaaattcttttttaggtactccagttcttttaaaggcttcatctaatgcatctttatatgtcttacctgttcctctaatatccaagtctataccttttttaaacttgtatcctgttatacttcccagcttagtgtttttttctttggttgcaacgggagcggtcttcttaccaacatctccagctgttttagcccctttatccaccttcgaaacttttgctagcttatctcccttgcgaatccatttgacaatcctcaatggaggcgttaaattaacagcggcctcgaaccgttcaaagagagaaagctttttgtatgtatcaggatcatatcccaatgcagctcgttcaaagtcactttcacctaagagctccaagccaattcttgaatatttctctaaatcacttacttctttatcctctgcaggaggatcgtcaaccaactgtatgccgacgacatatttaccatctaaataataacagtatttatgaccattcacatatttataaaccttttttagtttttctaattctttttcactcaggttttctaattcttcgtcagtatacacttttttggacacttgtgtcgccaatttttttaatcgatctggatcggcgagagtgttaatgtccgcatcttctttgtctccgacttttttcaacatgacacccatcgctgtttcttgatttccactcaaggtatccatctcatccggctttaaaatcgaacctttttgatagccggttatttcaatttttggtccggtatacatcttttcgagccgcgccatgtatctctgcatcgtctcaagatcgttttcagccgttttgagggcgttggtttgcccgcggtcaaacgcatggagcttttcaagagtcgtgctgatttcctttaacgctttctgattttgttcatgaaaaccgctgtcattcaaatccggtaaatcgacaatatggctgacttttgcgatcgtggcgttggttttagaaaccaaatgtttcgttgtgcgatcagcggcattcaagccattctccaactcatgcccgagaaaggactgtgaaataaatccgttatggtttggttccagggaattcagcgcgcttttcattttcttcagcgcggaactgtattcctctataaaagtatcatagaactgtagaaaaggggtgtggcattcctcgtaaaaggcgcggatcgcgtcgccgccttttccctttaaagcatcatcaagtgatgtgatgccctcaacagcctttttgactttggcgattcgtctgattgttgttttaattgttccagcgtttgatctattgcattgtgcagcgcctgaacatcaagagtcttcatggcattctcctctaatccttttcattacaatcagtatatagtttaccactttatagaaagtacttggtgaatatatcctgttcaaccatgaaaatgaatcattgggcttaggtcattatttctattgattcatttcgattaccgtaaacaagtttgttgtagcattctttaggctctgtgactaaaccaaaaagccatttgttttaaattggtctttcggtatcacgaaaatttcgttttttgggctgatagaagttttgcaattatgaattgtatgttaatctttaacataaaaaggatgttagctggaagggaatgatggcagttggagactatcccgtcttcagaagttggaatcaaaataaaccgctggtacaacgaaattcaaaaattaaacgtaatagaagcagaacgattaaaggcggaagttcacttagctatagaaagaatggaagaagatcaggacttgctttcctattatcagcttatgaattttagacatgagttaatgttggaatatcttttcccggcagaaaaaaagctgagcaaatctgattatcttagggaaattgagggacagggaagaaaattgtcaggcttgctcgaatactatttttcctttttcaccggaatgtatcatttttctcgcggaaaatacataaaggcaatcaaggcatatagagcagcagaaaaaaagttgacgaaagtttcagataaaatagaaaaggctgaattctattataagatggcggaagtgttttatcatatgaaacagactcatatgtcaatgtattatgtgtctctcgcttatgatatttataaatcctatgatgcatatgtgattcgaagaattaattgtctattcgttgttgctgggaattacattgatttatcaacccatgatcaagctttaccgcatcttttaagcgctaaggaatccgcggaagacattcaaaacaaggcgatcgttgcaaaggctcttttaaatgtagcatattgttataatgcaatggagagaccaacaaaagctattgaatactttcataaggcgattgatgtagcaaaggaaataaaggcaaaagaactgactcaggcttattatgatttggcattaattcactttcgaaataacgaaaatattgaaggacgaaaattttatgaaaaggcgcttgaaagtgcgcgggtatttgaagatgaattattcctgtgtctgttggatgttttagaggcactgtttataaaatcagctaataagtcagaggtactagaaacaatgaaaccattacgggatagtcgtggttacccctatcttgaggaactggcattagaagcagctctattctatactaggaatgagcggccaaatgattccatatttttttatgatcagatggtgcaggctcagaaacaaatcaaaaggggcgactttctgtatgaaatctaagctgtttctttcgctgacccttgctttgggcttgttggtcgtgtcgagcgcttccattcacacatctgttgaacaacaacatgcagaattttctgtagcatctaggctcgcaacataattgtgtttgggcaggtcatgtgatggcctgcctttttggtgaaagaattattttagtttgaaaaccagaacgattgtgttaatactcatctttcttcgtcccttgtgttggaattttcatcatatcaatatttgaatatgcggctgtccgcattattaacaattttaaattttttgcacaaattttatacaaaggcagacaaaaaccttgatatatcaatggttctatgggtatattcaaccacgaccaccgatatcgctaaaaaccgtattgccaaacgacgaaagagcgttccttacacaaggaatgctctttttgtttattcctcatcaaagcggagagccgccaacataaacgcaatgaccaactgttgtccgcactctcactcttcattcagcgcaccgtgaaatgatgcataccgttcaaacagttgtcccttcattgaagtccattcaatcaagatcacactcagtaagtcagtaagaatgaagcaccttgtcatcgacaaggtgcttttctttataccaatgatgtgttccgatcctccgaccgcctttttacgttttgtttacaagttgatcaaactttagcgacatctgcccgctatattgaatacagcatggcttcacctaaatataggaaaaggattaatttttttttgaggaggaatacagttgtcaattcgcattaaactgcctgacgggtccgtcagagaatttgaggaggaagcaagtattgaagatgttgctgcttccattagctgcggtctggaacatgcggttgcaggtaaattaaacggaaagcttgtagatttatcaactccgcttcaggacggtgcactcgttgaaattgtcacccgggactcagcagaaggacagaagatcgtgcgtgaaaaatcgcgggggaaagggcgtattgtggcacttgacgcagcacggggactggcggtcatcgggatgtatttgcagcacttcgccttgaacgaaacgaacggttcgatcgtttccgggaatacgacgcttctatttgtgctttgcggcggaatctcctattcgatcatggccgggcgcatgatggacagaggaatggagccggccgcatttcggacgcggatgcttgcccgcgcggtatttatcgatatgataggatatctgctcatcatgctgaatactccgttcggggtgattttgccggcttatgctgcactttttgtgctggcattggcgctgattcgccgttcgacgcgtgtgctcgttacaacagcagctgttttgcttgcggtgagcccgccgctgatgattctcggagggagcgtcctgtcgggagcaaacttgcttggcgatattgcaggcggcccgatgtcggcgctcgcacttgcacccgctttcgtcgccggtatggcaatcgggcgctttgatctgaccaggatgcgtacggcactttcgctagtaagcagcggcgcagtcatgcttatcgtctctaagttattgggcgttttcgttcttccttggctgagccgttccttcgaagaatggctcgtaagtgttcaaggcaccgccggcgccgagctggatcagtatgcaatctggccgcacaacgtggcaccgccgctttggcacaatcttctttcgatcgctccgcacagtgcgtcaactttccagacgatgctggggcttggggttgcctttctggtgcttggattggtatgtctcgtgcagcagaaaaactctgccgtgttaaagccgttcgcgggagtcggacgtgtggcgttgacgatgtatgcagctcagtttgttgtcatatggactcttgaaatctcgggggccaagtatgatatcggggccattccattcagtgatctgttcgtcgcggccatggtgacggtgacagggtggctgattgcacggcttcctaccggtccgctcgagacagcgatgcgacgctttgaccgggcattcagcaatttgggacccgtcacgggaccggcgagactgagataggcggtcttcaacatgttgcctgaaggaaccgagaggcagctccttcaggattttagcctgtcgagaggaatatgcagtggatgagttcatgctgaaccagagtccgaggaaacttgtataaccaaaagttctacaggcctttgtttatctataaatgaaatccagctaagacccctcacccttgtatcgtcttttctcttattacaatttgaaaatattaagaaatggggatgtgtttaagaaatcgtgcacaaagtgttatctgatgtcggttttatcgcttatgatgctgccaaagggaagattatggccttcacgtataaagatcacaacaagaacttaactgttttcgctaacgatttaaccaatgacgatcatccgcagcatcaatatcggttgctggctaattcgattttcaatgccgctcccggaaaaactgacaatgctccatcatcaaaacggtgagaggttggaaagctaaagttcaaacggctcgcaggaggcgtctcgtccaaggcgtcggaagcagaactgaagcatgttatcgttagtaaagaaatgttcagtcgcatcacgcattaaatagcaaggctctaaaaactgcccttgatccgaagggcagttttttcttggtctatggcagcatcgtcctttcttccagttagaaagcttccgattggcgggcctctatgttatagctattgaaggtcagcatacttgtgcaataaaatgaagagcggagaatatgcagtggttcgcataaaaaattttacttgcacgaacagttgacattcggtagtcacagtgatttgataaaggaaattcgaatacagaaagacgggagctgaaacattgaagaaactggtgaaggtcagaggaattacattgggtgaaggccggccaaaaatctgtgtgccgcttgtcggaaaaaaccttgcccaattaaaagaagaagcggcttattttcaaacgcttgatgccgatattgcggagtggcgtgctgatttttatgaagatgtagatgacgttgatcaagtctgcgcggcattggcggaaatccgcggccttttaaaggacactccgctcattttcactttccgcagcgccgccgaaggcggagaaaaagagatcagcacagcgcgatatttttctttaaatgaagcggttgttaaaacagggcttgccgatgtgattgatatcgagctgttcaatgacgaagagcaagtgaaagcgctggtggaaacagcacatggtcatgaagtgtccgtgattatatctaatcatgattttgaaaagacaccagctgcagaagaaattgtttcccgtttgcgaaaagcacaggaattaggggctgatctgcctaaaatcgcggtgatgccggaaaccacggctgatgtcttgcgtctgcttgaagccacttgtacgatgaatgagaagtatgcagatcggccgattattacgatgtcaatggccggcaaaggtatcatcagccgcctggcgggcgaggtattcggttcagcaatgacgttcggtgccgcaaagaaagcttcagcaccggggcagattgcagctggtgagctcaaggaaatccttcatatattgcatcgcaatttataacttgatgattgagaggagcctggctgacagccggctcctttgtcagttttttcgtagtcctaacgactcatttatctttcttttcggaatcgttttaactttcccttttcattcataatgggttgtgatacgataatcacgaaatttaatagcattactaggggtgcccgaatgcgggctgagagagagacatgcgtttcttaaccctttggacctgatctggttcgtaccagcgtggggaagtaaaaaggattcgagagaagatggggaatgggtatggtccgtctgtcttctagcgattttactgactgtaaaaccaggttcatcatatgagcctggttttttgtgctggtgctgttccggagtttcgtcctgatcaattttttagaggggaaggatttttacatgaaacaggaatcagtacagcaaaaaaacatctcgataatgtcaagtttttcagggagccgcaaagtgtatgtcgaagggtcgcgtcctgacattcaagtgccgatgagagaaatttcgttaagtccgacgacgggttcgtttggcgacgaagaaaaccagcctgtccgcgtctacgacacgagcggtccctatacggacgccaatgcggacgttgatattcttaaggggctgaaacctttgcgggcgacctggatcagggagcgcggcgataccgaagaatatgaaggcagagaaataagaccggaggataacggctataaaggcaaagagaaagcgagccacagctatacagggttgaaacgaaaaccgctgcgcgcgaaaaaaggacaaaatgtcactcagctgcattacgcaagaaaggggatcattacgcccgagatggaatttattgcgatcagagagcacgtatctcccgaatttgttcgtgatgaagtggcaagcggacgggcgattattccgtcaaacatcaaccatccggaaagcgaaccgatgattatcggccgcaacttccacgtcaaaatcaatgccaacatcggcaattccgctgtcacctcttcgattgaagaagaagtggaaaaaatgacatgggccatccgctggggcgctgatacgatgatggacttgtccacaggtaaagatattcatacaacgagagaatggatcatccgcaactgtccggtgcctgtgggaacagtcccgatttatcaggcgcttgaaaaagtaaacggcgtcgcggaagatcttacttgggacatttaccgcgatacattgatcgaacaggctgagcaaggcgttgattatttcacgattcacgccggcgtccttctccggtatgtgccgttaacagcaaagcgcgtcaccggtatcgtatcccgcggcggggcgatcatggcgcaatggtgtttggctcatcatgaggaaagctttctgtacacccattttgaagagatatgcgagattatgaaaacatacgatatcgcattttcgctcggagacggtcttcgtcccggctcgattgccgatgcgaatgatgaggcccaatttgccgaattggagacgctcggcgagctgacggaaatcgcctggaagcatgatgttcaagtaatgatcgaaggcccgggacacgtgccgatgcataaaatcaaagagaatgtcgacaagcagatggagatttgcaaagaggcaccgttttacacgctcggtccgctgacgaccgatattgcaccgggctacgaccatattacatcggcgatcggagcggcgatgatcggctggtacggaacggccatgctttgctatgtgacgccgaaggagcatttgggactgccgaacaaagatgatgtccgcgaaggcgtcataacatacaaaatcgcggcccatgcggctgaccttgcaaaagggcaccccggcgcgcaaatccgcgatgacgcgctttcaaaggcgcgctttgaattccgctggcgggatcagttcaacttgtcgctcgatccggaaagagcgctcgaataccatgatgaaacccttccggcggaaggcgccaaaacggcacacttttgttcaatgtgcgggcctaaattttgcagcatgaggatttcccaggatattcgcgactacgccaaggaaaacaaccttgatgaagaaaaggctatccaaaaaggattggaagagaaggcgaaggaatttaaaaaagcaggcggcagcatttacagttaaaagcgggcaatacagcagatgaaaggggaacctttcatctgtttttttataatatagggttgacaggtcggaataatatgaattagtatgttatttaatatttctgaaaattccatcagcgctgatcggtcaaccgaaggctcttatctcaattgggataagagctttttattttcagttttagaaaagaaaggagaacaagatgtctttatcaattcgtgtgaatgaaaaagcatttggaaaaggcagctttaaaacaagcgtgctccaagacgtgaatcttacgatcgaaaacggcgaatttttgactgtcatcggtccgagcgggtgcggaaaaagtacgctcttaaaaatcgctgccggtcttgacggggattatgaaggacgaatcagcatgaacggaagagaaatcaagggcccggggattcagcaaggcttcatctttcaggagcatcggctttttccatggatgacggttgagcaaaatatcgccgcagatttaagcctgaaagaaccagcagtgcgaaaaaaagtcgatgaattgattgaaacggtacggctgaaaggtgcggagaaacagtacccgcgcgagctgtccggcggaatgtcgcagcgggtcgcgattgccagggctttgctcagggagcctgagattttgctgcttgatgaacccttcggtgccttggacgcctttacgagaaagcatctgcaggatgtactgacagacatttggagagaaaagaagatgacgatgatcctcgtgacgcacgatattgacgaatcggtgtatttagccaaccggatcgcaattcttacggcaaagccggggagaatccacaagctgattccggtcgatctgccttttccgcgcagcagaacatcgcccgtttttcaaacaattagacaaaaggtgctgaaagagttcgagacaacggaaacattcagctttcaggaaggttcaggaatttgagcagaaaggagcggaaaaacgtgaaaaaatggccgttgtatgtgctgggctgcctgttgcttcttgcgggctgttcagcagccaaatcaagtgaagggggcggagatttaaaagagatcaacatcggagtgcagcaaagcttaagcccgttgctccttgcgaaagaaaaaggctggtttgaaaaagagttcgcaaaagaaggaattaaagtgaaatggacagagtttcaaagcggtccgccgcagtttgaaggtcttgccgcggataaactcgatttttcccaagtcggaaattcaccggtgatcgcagggcaggcggctggcattgattttaaagaaatcggcctttctcaagacggtttaaaggcgaacggcattcttgtgaaaaaagggagcggaatcgatgacataaaagatttgaaaggaaagaaggtggcggtggcaaaaggcagcagcgggttcgatttcctgtataaagtgatcgataaagcgggtctgaagccaacagacgtcaacatcattcagcttcagcctgacgaagccatgccggcatttgacagcggagcgattgacgcctggtcgatttgggagccgtttttgtctcttaaaacgatcaaaagtgacgcggacatattggttgacggggaacaaatcgacaagtattccccgggttttacgcttgtacgaagcaaattcgccgaacagcatccggatgaggtgattcgttttctgaaggtgtatgacaaggccgtgaaatggcagaaaacccataagaaagaagcggttgaagcgtacgcaaaaattaaaaacctcgacaaagaggtcgttgaaaacgtgctgaataacaccgaaccgttaaatgagccgatcacagaccgcatcattcaaacacagcaggagaccgccgattttcaatacaaattaaaagcgattaacaaagagattgatgtaaaagaagtggtcgacaattcatttataaaaaaagcgctgaaagaaggagatgacaaatgagagctgtttcatcaagcaccccctcgatccagccgaaaacaggcgcaaaactgagaccggccgcttttcggctggcatgggggaagggatttgtattacccgtcatgttgattttattatggcagcttgtcgggtcattggagctcatatcaaaaaccgtgcttccggctcctttagatatattgcttacatttcgggatcttatcgtatcaggagagcttttcactcatttaggcatcagcattcagcgcgccgcgctcggctttttcctgggggccgggctcgggctcctgctggggcttgtaatcgggttttcgaaaattgccgaggattacctcgatccttctctgcaaatgctgagaaccgttccgcatctcgccgtcacgccgctgtttatcttatggttcggtttcgatgagctgtcaaaggtgctcttgatcgctcttggggctttcttcccggtatatatcaacacattttcagggatcaggggcgtcgattcgaaactgttcgatgtggcgagggtattggagttccattggctgaagcaggtgacaaagctcattcttcctgcatcgctcccgaacattctcttaggcatccgcctgtcgctcggcgtatcgtggctgggccttgttgttgccgagctgatgggatcaagcgctggagtcggctatatgattatggatgccagacagttttcgcaaaccgataaggtgtttgtcgggattttgatttttgccgccgtcggcaagctgacggattcattcgtcagaattctggaaaaaaagtgccttggctggagaaacagctatcaaggaaacaaaaagtaaaggggagatctttttggacattttatggtttattccgactcatggcgacggacgttatcttggtacaaacacgggaggaagagccgcagatcacacctactttcagcaggtggcgcaggcggctgacaggcttgggtatacaggggttcttcttccgacgggaagatcgtgcgaagacccgtggattaccgcagccgctctggcgtcagtcacgaaaaatctgaagtttttggtcgctgtaagacccggtttgatgcagccgtcggttgcggcgcggatggcttcgacattcgatcgtcttgcagagggcaggcttctcatcaatgtggtcgccggcggtgatccgtatgaattagccggcgacggcctgtttatcagccatgatgaacggtatgaagcgacaaatgagtttctcgacatatggcggtcgcttttaaaaggcgagaccgtcagctactcagggaaacacctgaagactgaaaacgggcgcttgcttttcccgcccgcccaacagcctcatccgccaatctattttggcggctcgtcaaaggccgggcaggagactgccgccaaacacgcggacgtctatttgacatggggagagccgcctcatctcgtcaaagaaaaaatccaatctgtcaaaaagaaggctgaaaaagaagggagaaccgtccgttttggaatcaggctgcacgtgatcgtcagggaaacggaaaaagaggcctggcaggcggcggatagactgatcagccgcttggaggatgaaacgattgccgcagcccaaaacgcgatgaaacggatggattcatcaggacaaaagaggatggttcagcttcaccagggaaacagaagcaatcttgagatcagcccgaatctttgggcggggatcggactggtcagaggcggagcgggaacagcgctcgtcggtgatccggaaacggtagccagccgaataaaagaatacgccgacatcggcattgagtcctttatcttctcaggttatccacatcttgaagaagcgtaccattttgcagaaaaggtttttccgctccttccgtttcgaacgaaacttcaaagtaaagcatcaggcgaagtcatcggaaatgaccattttccgtcgaggcaaaaagaaaaaaccgtttaaataaaaaaactccagacattctggagttttttatctgtttttataaaatgaaaacatatatgaaagatgctgaataatgatcagcataaagatgacgataatcggaaaagacggaatcctgacttggaaaaacggataaaagatcaataaaagcgctgcgaccggcatcgccacatacagcacgatatatgatgttctgcatgcttttgcggtaatcatctgctctctttcatcctgctctttaaattcgtcggggacgagcataaagcgctgcttgcgtgaaccgctttttttctccaagtatgtgtaaatcgaaaggacgagcccaaagagaaggatgggaatcagattaaacacaaaatgaagctctgaatcgtttgttttcaggcttttggcaatttgttccgatgtgtggaaaaaggttataaacgtccagcatgcgagtccgaacagaaggatgtgaaagaaagtccgtgttatcatattcattcgtttttgtccccctctagccaaaatacgtcttccatttttaattgaaattccttgcaaattttcaaagccaaaagaagcgacggtatgtaattgcctttttcaatggccgcaaccgtctgccttgtaaccccgatcgcctttgcaagggcttcctgtgaatacccgtatcttgctctcaattctcttaccctgttgttcatcctaccacctgcaattcttcgtttatatagtatatttgacatattgttaaatagatttgacataatgttaacttgtttttacaatgtaatcaatatcttttgatctaggatcggcaggtttgtaacggcaacatttaaatttatacataaaaataacagaaatggaatagataaaatagaatcatctcgtttttttaaaaaaaggactttgagggtattttggcttctggattccgggagaagaaagggcttattatccagttcttttttctcgaactccttgtatggcgcgagatttataaagagaaaaaataagagaaaaagaaggcgggaaaataagacaaatagattatacaggcttcgtaaaatggaaacggggcttaaattttctcattcaagccgaaaagggtgggacattagattgaaaaaccaagagatccttaaataaatagttggaacgtagtgtttatgaaataggaaatttcatagatttcagtatgattttggatatgttactctttggttacttgatagaaaggagggggaaaaatgacatacgcagcacctcaggttgactattctgtcaatccgtcgatcgaagatcaggcttggttcttggtgtttgttgcagtgcttttggcacttggagcaactgttgttcttggcgccgctgtatggtgtgtggctaacggaaacggcagcttcacgggatccgtcaaatgggtcagcggtttgcaggtcagcatcgaatgtaggaaatagccatacttaagtatctgttcacaacaacaagacatatttgatgaggcttaaccgtctgtggggggcggttaagcttttcctgacattaatcataccctggaggcattatgtttataatagatcatctgtctaaaacatataaaaacaatgtgactgccgttagcgggtttcatataaaaatcgaaaaaaaccagatcgtcgcgatagcgggtccgaacggttcagggaagacgacgatcattaactccattttaggaatcatcacgcctaccgaaggaaccattctgttggatgacctgccgaacacgacggcggaattcaagcagaaattcgcctacgttcccgatgaactccttttgccggacgccctttcagccgcagaatatttggattttgtatcttctatgtatcattgtacatcaaatgaaaaacggaaacaattaatcgagcttttcgatatgaaagaggctttgcaggagccgattgaaacgtactcgcacggaatgaaaaaaaagacgcagctgatcgccgcttttatgctggagagcgaatttgtcattatggatgagccgtttcgcgggctcgatatagaagcggtcatcaatacgaaaaagctgatgaagcgctatgcggccacgcaagggtcgatactgctggccacccatgacatgctttctgcggaagaactgtgcgataagatagcaattctatcaaaaggcgtcaaaatggatgaaggaaaagtgaaagaattgaaggctaaatataacagcgattcacttgaagaagtattcttaaaagcttcgatgctgagtgataggggtgctcattttgatcaaatcattcgaaatttctaaaatgatgctgaaaatgtggcagaaggaaatgggcaagctctttaataccggtacaaaaaaagcgatcgccgtgctttttttgcttttggcggtaatgatgggaagcatcaccggctacagctttacaggcatgtttttaagcgcgtttctgaacggcgaagttcgttctctcggattgttcgtgatttccatgtttatgaacgcgtcgatttttacatttgttttcttcattttatttaaagtaaggacgccagagcagcacagcttttccatgcagctcagctggtttccgctgacggccttccagagaagcctcggatatttcatcccgtttgccggagcggtttcatttcttgtcctgtttatgattttcattctgctgattccgaactttgtcgccagcggtgttgggttttggtttgcttttacgttttttgcacttctttttgtacagatcatctttttcttttcgcttctcaatcttgtctataacttggtgtatatgttgattttaaaattcggctttccgctgcaaaagtttttttcaatgtttgtccttgtcgtgttagccgtgttttacggaatcacatcattcgatcttggaaacattcagaacgcttattcgtcttttgattatcatttgacatattttgcagcgccgctgtttctcatgctgaacggtcaggcgtcggatgccggcgtcattccgattgtactgatcttgacagcagcagtcacggcctcttttatgtcgctgaatgttgtgccgatcctcactgaaaaaaaatcatctaaactgttttcatttattaaaatcccgtcatcaaagccgctgtctttggcggtgaaagaaataaagtctcaagcccgaaatgaagaaaatattttaaacttcatttttttgcttttggctctatgctttttgaaattcaagtttcagtttggatttaccggtgagagctatttggttctgggaggcgtgacaggtatcatcgccttcaattcatttggcaacgatctgcggatgatgcagatgtataaggcgcttcatttaaaaacggcaacggtactgtggtcaaaatatctcgggctctgtatgctcggcctcattcagctctttttgttttccgtgctgacgtggactttcccggagagctttccggtctttttaaagacggttgccgtgatcttaaactcgattgcgatgttctatttagcgggcattatttttccgcttgaccgaaacaacccttatatggggatcttctctttcggaatgctcctgctctttttgattccgctgtttttcatcgtgaattatgcggttgataacgtcacgggcgaagcgctgctgtttttcataccgtgccttgaattactgctgatcctgcttttatacggaggatttaaatggaggtaccattatgatcattaatatgttgaaatcgcttgccggaatcaaaaaaattccctatttcccagagcatgtgacactgaatcggaagcatatttcagatcatgatcttgatgctgattttcccattaatccgactgcttatcaaatgctgaaggaagtcgacgggaaaaaagacgagctggagattgccgaagctctcaaaggtgtgtttaatgtcagggaagaggtgctgcagaaagatttgcacgaattgctgacagggctcaaccgccgttatttgatcaattggaggtacggagagggcccgtcttttgcgggagtgctttatcaattcttcagccagtatcatatccgctacaaggagaggttttcaagccattctgattcgtttctgctgttgtacataaagtttctgcaagtgatttctaagaaaatcatcgtgttctggctcgtctttttgatgttgtcgcttgcagcgtacaccgttgttccggatggatcgatcgtcggcatcgcggcttatttttccgtcgtctatttcgggttgatcaccggaacggcgcttcatgaagtggtgcacggcatcgcgcaccggaaagctgccggcaggaacggcccgcaggggtttttagcggctgatatgatgtcagtcaaatttgtccgccctgtcatgtcgctgcatgataaaaggtcgatttggattacggcgttgggaccgcttgttccaggtgtgctcggaatagccggcgtgctgtttacggtcttttttcttaaggaaaacgcggtttccgtcggagtgctgctgttcttttccacctatgctttgcatatgatgtatctgcttccgtttatgggtgacggaaagtcgattatgaaacagctgatgatcagaggaattggaggtaaatcatcatgaatacaaactctttaaagcagggactaatctttgccagtttctcaagctttctcgcatttccgatgcttgcggctgcgcttttgttttatcaccttttttcaaatcaaacgagcaatgatatcttgtttaacagtttgtcgtttgtcatggagagcgaatcggctttttcattccaggtgaagccaaactttttcttcattatgatcgggctgtttatcggcatttttattataacggctgcgatttcatcaatttatcagaaaaaaaagggtgaatcttaaaagagcttgcttccctgaggcaggctttttttatttgcatcggcagtcaggttgtggtaaatttaaatcgtaatcattacgctttggaataaaggaggatactcagagtggccaagaaatcaaaaattgctaaagaaaaaaagcgccaaaagcttgttgaacaatatgcagaactcagaaaagaactaaaagaaaaaggcgattacagagctttgagcaagcttccgcgcgactcggcgccagcaaggctgcataaccgctgcgaagtgaccggaaggccgagaggatatatgagaaagtttaaaatgtcgcggatcgcgttcagagaattagcatataaaggccagattccaggtgtgaagaaatccagctggtaatctgtcaatgtccggaaaaaagctgccgatgttaaatcggcgttttttttcgacaaatttttaatatacccttgacgaaattttaataaacgtgtaacataataaaagtcaaaacgatgatgttgtttttagtgatcatatgcgggtgtagtttagtggtaaaacctcagccttccaagctgatgtcgtgggttcgattcccatcacccgctccatacatactgtttataacgcagtgtttcgtttctcagattaaacgaagcattgcgttttttcatgtatgaaatcatcataaaaaacctgctcttttcaagaacaggtttttacggaaagacggctgaaatgtgcctgccgccgtgaatttgttcaaacatttttgtcaaagaatcgagcagccggctggcttcttctttagataatgacggcctgaaaaagacgagctgcaaggcatcttttgtgtccgctcctgcatgatgaagactgaggttttcggtgatcgtgccgaatgctcccgcatcatcggagaacgtgatgatctcgtccgggccgccgggttcgattttgatcggacccttcaaattccgggcgtcatatatatgaaccggaatcaaatatttgagagagaaaaaacggctcagatcaaccgctgaatttttcggctcgacaaagcgctgctctttgatgtcttccagcatccgttcgagtccgctttcccggcctgaaaaagacggattcagctccctgaaggcatcatgccattcttttacggccgattcatcttcgatactgcggtcggcatagtcaaaaaacagcgattcctgaaaaaggcggagccggcctttaagcatttgcggggagccgttgatctcaataccttgatataacacagcgccaaccttaaatgaaggaatgcggtttaaaatagcaggcgcaatttgcaaacgaagttccaattttaattcaactcccgtgtcatggtacactctattatacagagagcgaaaacgaaaacaaagaaaggaggctctgcgcgatggatgtgaaaaaactgaaacaggatgtcatcgaattcgcacagcaaatcggcattgataaaatccggttcgccagtgcagatacatttgaaacattaaaagaacgattgattgagaaccgggcccttggctatgaatcaggctttgaagaacccgatcttgaaaaacggacgaacccggatctgcttttgccgaaggcgaagtcgattatcgccatcgcccttgcatacccctcaaaaatgaaagacgcgccgagaagcaagaaaggcgaacgaaggggcatcttttgcagagcttcctggggaaaggattatcatcatgtcctgcgcgaaaagcttgatcagcttgaagaatttttgaaagcacagcgaagcgatgtcagaacgaagtcgatggtggacaccggtgagctttcagacagagctgtcgcagagcgtgcgggcatcggctggagcggaaagaactgcatgatcattacgcctgaattcggatcttacgtttacttggcggaaatgattacgaatattccctttgagcctgatgagaggatcgaagaccaatgcggctcatgcaacaagtgcatcgaggcatgcccgaccggcgcgctcgtcaagcctgggcagctcaactcccagcgctgcatcgcttttcagacgcagacaaagggttttctgcctgacgagttccgtacgaaaatcggaaacaggatctacggctgtgatacgtgccagatggtatgcccgaaaaataaaggggtcgattttcatctgcatcctgaaatggagccggaccctgagattgccaagccgcttttaaagccgcttctgacgatgtcgaatcgcgaattcaaagaaaagttcggccacgtggccggctcatggagaggcaaaaagccgattcagagaaatgcgattatcgcacttgcccattttaaagaaacggacgctctccctgaactgattgagctgatgcacaaagatccgcggccggtcatcaggggaaccgccgcatgggctgtcggaaagatcggcggagcggatgtgatgagtgaattggagcgcgcgctcgcgcacgagcaggatgaagacgcaaaagctgaaattcaaaaaggcatcggcctgttaaaagaaacgagtgcgactaattgagggctgtcctgacatatgtttaatgatgagaaacgaattaacaaacatatggtggtgtagcccttgaaacagatcatcgagcagctcctgaaagccagacttcaatacttaattaacggcaatgatgaaacaaactggcgggatgccggaggttttgaagtcattgaacggaagcggaggctttttcaaaaacgcggcgtgcatatcgtgaaggccaatatagaagcggctgtaaaagagcattggcttgatgaagacggcgcgtcacatgtgaactatcaaacccataccgcatatttgtgcaaagacggggatgatatgtatatggaagaacatatggaagacagaaacgcccttttgtatgatcagatggtcattaaagactccgaggccctgcgtccggccgcacagtctcatcctgagcctgaaaacggcgatgaagatatgcgcgaattgctgggaagggcgttccgctatgaccggcttgccgcggtgcgctatgctgaaacgtattggaataaacgaaatcctgcttataaaaactttgaagacaattgcacaaactttatttcccagtgcataagggccggagatgcgccgatgcgcggctatccgaacagaggcaagggctggtggatgcaaaaccattcctggagctacagctggactgtcgctcattcgctcagaacctttttgaagcattcaaaagccggtctccgagcggttcaaaagccggctgcgaaagagctgatcgaaggcgatgtcatctgctatgattttaacggagacggcagatttgaccacgtggcccttgtgacagcgaaggataaaagcaatatgccgctggtgaacgcgcaaacgcacgactgccggatgaggtactggtcttacgaagattcgcctgcttatacttcatcgattcgatatgcgttttttcatatatcagatgatacgacaaaatcgaaatgagtggtataataaacagcggattagaaaaacagaggtgaatactttggcattgcatgtcgtactatatcaaccagaaattcctgcaaacacaggaaatatcgcacggacttgtgcagcaacagatacaacacttcatttaatcagaccgctcggcttttcaaccgacgataaaatgctcaagcgggcaggtcttgattattgggaattcgtcaatgtcgtctaccacgactcattggatgaattgtttgatgcccatcctgaaggccgttttttcttcattacaaagttcggtcaaaaaccgcacacttcatttgattattcagatcaaaacgaagattacttctttgtcttcggcagagagacgaacggcttgccgaaagagctgatcgaacaaaacatggatcgctgtctgcgccttccgatgacagagcacgtcagatcactgaacttatcaaacactgcggcaatcctcgtgtatgaggcgcttcgccagcagaattacagagatttgacttaataggtaaagagccctttttcaaaaggggctctttttttgttttccaatgtaacagtgttatgttacaatgtgtgtgaaggagctgaaacagatggttcaggatgatttaatttcaaaaaaagagctgctggatttgacttcgatctcgtacggacagctctatagatggaaacggaaaaatttaatacctgaagagtggtttatccggaagtctacgttcaccggacaagaaacgttttttccgagggaagacattttaaaaagaattgaaaccattcaaagcatgaaagaaaacctttcccttgatgagatggcggaaatgttttcgcccgatttgaccgaactaaacgcgagccgcggggagctgctaaaaaaaggcatcgtttcagaagcggtcatggcgttttttgaagaatgcaccggaaaacgcgatcatccatttaatttgacagaagcacttgcggcttatgtgctggaaggcttgcttcaatccggcgacatcagcctggatgaagggaaaatggtgctggatgtcatcatgtcgaacgaggcggaaaacaagggaaggctgcttgtgctccggaagctcggcgttgcaacatgtctgattgccgagggcagcattgtgttggaaaagggagtcaaggtagccgctgacatcaatctggcggcgagcagtgaagaattgaaaacaaaattcatgtaattggaggatcaaagatggagaatttattgataaacggattcggcagttcaggcggaggcgcgtatcaaacggttgagttaaacggcaaaggtacgattaacggcgatattgactgcgaaaggttcagctgcagcggcaccgggactgtaaacggagacgtaaaagcggatgagctgagaatcagcggccatgcaaaactaaacggcgccatcgaggcttcaaaggttagaattgatggttctgcaaaagtggatggcgatgtcgaagcagaaaagcttaaaatcttaggctacgccggcattagcggacatgtgaaaggcgacgaagcgatcgttcgcggaaaaacgtcgatcggcaaagactgccaagtggaacatttttctgcagaaggctattttacaatcgacgggctgttaaacgcggagcaaatcgaaattaaggttcacggcggcgaaagtaaagtgaaagaaatcggctgccggaggatcgtctgcactgcacatcaatcgaagctgttctcgtttttatcggagcttatttctcctccaaggctgtctgccgagctgattgaaggggatcatatcgaacttgccaatacgaccgcaaaagttgtccgcggcaattcggttatcatcggcgaaaattgcgacatcggcctgattgagtataaggaagatatccgggtggccgaaacggcaaaagtcggagagaaaaggaaattatagcggagggataggacatgaagaaacacgacttgaaaatacacggatccggaagcgcggggggcggatcattccatcgtgttctcattagaggtgaaggaatgatcacgggaaacattgattgcgaaaaattcagtacacacggtacaagcgaactgtcaggcgacgcgaaaattaaaagctttagtgtacacggggaaacagagatccgggggaggctgaaagctgacaaagccagagtatacggcacggtggatgtttctgagaacgccgagatcagcgatgcagccgtgaaaggcatcatcaatatcgggggaaatatgacggctgacacttgcgatgtcaaaggcgccctgaacgtaagaggcgattgcgaggcagaggattttaaactgacgggcagcctggatgtaaagggcctcctgaacgcaggtgtgattgacatcggcttaaagtacggaaacagttcgattggcgatatcggcggtacggatattaagatcgtcaataaacgcgggctgttgtttaatagaaacggaggtactctctcggcagggacgattgaaggagacgatatttacctggaaaacacggcggcccgaatggtcagaggaaaccgcgtgcatataggaccgggatgcaagattgagaaagttgaatacaagagcagctaccgggtatctccgaagtctgaggtaaatgaggatcaacagcaataaaacagtgttatgttgtgaaaaaagggatggctttaaaagtgagccatccttttttcttttttaattttactttccgggtttgctttcgtatccggcagtaaatatggatacgagaaacgcgaggatgacccccatcatgatcagcgttctcattaaaatccccctctcatccttgatcccttgttgtcatctgcaccgatgcggcgagccgttccgcaggagcacatgcggacggaacttttctgctcttattatgaatggtttgctccagccttgtcaattcgaggaaagtacatttcatttttcatatgaaaagcatctaaagggacatcttcgcatagagtgaatgtaacagtgattcacttggcaccttgcatttatcatcatataggaggttcttatggatatattaaaaaagattgaacagtatagagaggaagagcagcgtctgaaatgggaaggaaccttcgctgaatatctggaaatcgtaagagaaaatccgactgtcgcgcaatctgctcattcccgcgtttacaatatgattaaagacagcggcattgaagagaaagacggcaaaaaagtatacagcttctttgacaaagagctgtttggtcttgaagagcctttggaacgccttgttgaagaatactttcatccggccgcgaaacgccttgatgtcagaaaaagaatcctgcttttgatggggcctgtcagcggggggaaatcgactttggtcaccatgctgaaaagggggcttgaagcatactctcttacagatgaaggggctgtctatgcgattaagggctgcccaatgcatgaagatccgcttcatttaatccctcagcatctgcgggacgatttttacaatgaatacggcatccgcattcaaggaaacctgtccccgttgaacatgatgaggcttgaacaggaatacggcggaagaatagaagacgtgaaggttgaaagaatctttttttcagaggataaacggacggggatcggcacgttcagtccgtcagaccctaaatcgcaggatatcgccgatctgacgggaagcattgatttctcgacgattgccgaatacggatcggaatccgatccgcgcgcataccggttcgacggagaattaaacaaagcgaacagaggaatgatggaatttcaggaaatgctgaaatgcgatgaaaaattcctctggcaccttttatcgcttacacaggaagggaatttcaaagcgggccggttcgcgctcatctcagcggatgaattgatcgtagcccacacgaatgaaaccgaataccgttcatttatatccaataagaaaaacgaggcgctccattcgcggattatcgtcatgccgattccatataatttaaaagtatcggaagaggaaagaatttatgagaaaatgatcgctgaaagcgatgtgtctgatgttcatattgcgccgcacacgctaaaagtggccgcgatgttttcaattttgacaaggctgaaggagccgaagaggtcagacattgatctcgtcaaaaaaatgaggctgtatgacggagagagcgttgaaggatacaattcagtcgatgtcgaggatttgaaaaaagaatacactgatgaaggaatgagcggaatcgatccgcgttatgtcatcaaccggatctcgtcgacgatcatccgcaaaaatatggagtcgatcaatgcgctcgatgtcctccgttctttaaaagaaggactcggccagcatccgtcgatttcggcagaagaccgcgagcgctatttgaactttatttccgccgccagaaaagagtacgacgaaatggcgaagaaagaagtccaaaaagcgtttgtatactcttatgaggagtcggcgaaaacgctgatggacaattatcttgataatgtcgaagcgtactgcaataaaattaagctccgcgatccgctgacaggagaagagatgaatccggatgaaaagctgatgaggtcaatagaagaacaaatcggcatttccgaaaatgcgaaaaaggcattccgagaagaaattctcatccgcatttctgcctatgcaagaaaagggaagcgatttgattataattcccatgagcggctcagggaagcgattcagaaaaagctgtttgcagacttgaaagatgtcgtcaaaatcacgacgtcgacaaaaacgccggacgaacagcagctcaagaaaatcaacgaggtcgtcgcccgtctcattgatgagcacggctacaactcgacaagcgcaaacgacctcttaaaatatgtaggaagcttattaaaccggtagcttgaagacccgtccggagaagggcgggtccttttgtcccattttcaaaattgtttgtcaaaagttatttgcacctgcataagataacaataaacacttttagacttgcatccgcaggactttgacctataaaccgaagccatttaaggggattatcaataaggaggggaattcatgtcccataaagacaatggccattttattatttctcaggaagactggtccctccaccgaaaagggtatgatgaccaacagcgtcaccagaaaaaggtgcaggacgcgatcaaaaacaatctgcctgacctgattacagaagaaagcatcattatgtccaacggcaaagatattgtcaaaattccgattcgctcgttggatgagtataaaatccgctataactatgataaaaataaacatgccggccagggagacggcgacagccaagtaggagatatcgtcgcaagggacggctctgataagcggggcgccggcaaaggccagggagcgggcgatcaggccggtgaagattattatgaagcggaagtttcgttaatcgatttggaagaggcgctcttcagcgaaatggagctgccgaatttagaacagaaagagcgcgatgatatcgttgtcgaagatattgaattcaacgatatccgcaaaacgggtttgacgggcaacatcgataagaaaagaacgatgctcagcgcatttaagcgaaacgcaatgactggaaaaccgtcgttttatccgatctatcccgaagacttaaaatttaaaacgtggaatgactctgtaaagcctgaatcaaaagccgttgtgctcgccatgatggatacgagcggatcgatgggcgtttgggaaaaatatatggcgcgaagttttttcttttggatgacacgttttttacggacaaagtatgaaacggtcgatatcgagtttatcgcccatcatacagaggccaaagtggtatcagaagaagatttcttttcgaaaggggaaagcgggggaacaatttgttcatctgtataccgcaaatccctcgagctgatcgaagacaaataccatccgacacgctataacatttatccgtttcatttttcggacggcgataatctgacatccgacaacgcgcggtgcgtcaagcttgtcggagagattatggagaaagcgaatatattttgctacggcgaagtcaaccagtacaacagacattcaactttaatgtcagcctacaaaaatattaaaaatgaaaaattcaagtattatgtgctgaaacagaaagccgatgtttttcaggctctgaagagcttcttcagcaatgaagaacggcaccaatatacatgaaaaaacctgaattaaacctccgctgccggaggttttttgtttggaaaatatttaaatcaaaattttaagtgcaaggttattgacattctttattactttaactaatatttaatcttgttaactatttattttgttgtgcagaggtaaaaacaaatttaccgtttccgatctttcttgctcagttttgaacaacttattcagtacacgtcccgcaagctgctgagcaggaaataggaaaagcaaaaccgagggagccgttcaaaccggcttcacccaaaatataaggatatgaaaggagaaataaaacatgagcaaaggacgtttaattgcgacgaacattatcggactcatcatcgtgcttgccatcttagcaggaggtgcgtatttctattatgacagcatcagctatgtgaaaaccgatgaagcgcacgtggcaggcgagatggccgatattacggcgcctgcatcagggaagctcgcagattgggatttgaaagaaggatcaaaagtttcgaaggacgaaaaaacagcgaaaatcaaaggggaacaaacggttgacgtgaagtcgatcatggacggaacgattgtcaaaaacgaagcgaaggaaggccagatcgtacaagccggtcaaacgcttgcgaaaacaatcgacatggatcatctgtacattactgctaacattgaagaaaacgacctgaaagacatcgaaaaaggggacaaagtcgatatcgtcgttgacggtgattcaggcactacatttgaaggaaatgtcgaagaaatcggctatgcgacaaactcaacatttgacttgctttctcaaagcaattcaagcggaaactacacgaaagtaacgcagaaagtacctgtgaaaatttcaatcaaaaacccgtctgacaaagtgctgccgggaatgaacgcatccgtgaaaatttcaaaataaccgggggaaataaaaacgagcgaaaggaggatgtcataagtggcttctcagaaaaaaggaaatatgtcactgcttatcatattaatggccggcttgtttctggccattttaaaccaaacgctgctgaatgtggcgatgcctcatctcatgacagagttcaatgtgagcgccacaacgattcaatggctgacaaccggatatatgcttgtcaacggcgttttgattcctttatcagcctttctgattatgcggttcggcggacggagcctgtttttaacggccatgctgctgtttacggccggaacgctgatatgcggaatttcgcctaatttctcgacgatgttaaccggacgcctcattcaggcagtcggcggaggcatacttcagcctttggtcatgacgacgattctctttatctttcctccggaaagccgcgggaaaggaatggggatctttggccttgcgatgatgtttgctcctgctgtcggtccgactctatccggctgggtcattgaaaactacagctggcggatcatgttttacagccttgtgccggttggtgtcatcgtcatcattttcggttttttcctatttaaaaatatgacggaacctaaaaaaatcaaattggatacagcaggcgcgattctttcagtcgtcggatttgcggcgttgctgtatggcgtgagcgaagccggctcagacggctgggatgatccgatcgtactttctacagttgtgatcggtgtaatcggcattgccgcttttatcatccagcagttgaaatcgaaagaaccgatgcttgacttcagagtgttcaaatacgatatgttttcactgtcaagcgtgatcaacgccatcattacggttgctttgtatgccggaatgttcctgattccgatttatttgcaaaacctggtcggttttacagcgcttcagtcggggcttcttatgctgccgggcgcactcgtcatgcttgtgatgtcgccgatctcaggaattttatttgataaagtcggcccaaggccgctggcgattgtcggtttattgatcaccgttgtgacgacctacgaatttacgacgcttacgatcgatacgccgtatatgtacatcgtgctgatctatgcgattcgggcgtttgggatgtctatgctgatgatgccgattatgactgccggcatgaaccagcttccgcagcatctaaacagccacggaacggcgatgtcgaatacgcttcgccaaatcagcggttcgatcggaacgagcttgatcacgacgatttatacgaatcgtacgacattccactatgcatcaatggccgatcagacaaatacggctgatccgtcatttatgagcacattgcagtcaacgattcagtcaaccgcgcaatcgatgcatatatctctcgaacaagcacaacaatatgtcgtgaaatatttgaccggacaggcgcagctcaactcgaacgtcatgggtattaatgacgcgtttatgtgggcggccgggttctgtgtcatcggtctcgttctcagcctgtttttgagggatgtcagaaaagacaagctgcgcaggaagaacaaagcgcaggagctgacattgcttccggctcctaaagaagcgaaagaatcttaaaatgaggaggttctgacatgaaaatttatgttgtttacgacagtgaaggcgagcatacgaaaaagctggctgaagccattgcagaaggcgcgggggaacatgatgctgcagacgtgcggatcgatcatgtcagccaggcggatattagaaagctcgaagaaatggacgctatcatctggggatgcccgggccatttcggtacaatcagctccggattaaaaacttggatcgacaggctgggctacctttgggcggaaggaaagctgatcaataagatcggcgcagtcttctgcacaacggcgacgacccacggcggtcttgaggcgacaatgctcaacttaataacaccgatgcttcatcaaggcatgatggtcgtcggcttgcctggaaatgtacctgaaaatgctttatacgggtcttattacggtgcaggcatcacgtgtcctgtcgacagtgacgaattgatcggcgaggaaggcctggagctgggccgggctttaggcagacgcgtcgcccaggtgacagaccgctttacagcaggacagtgaggagcgatttgacatgaccattatactgaccatcatcgctgctgtcctcgtcattatcggtctggtggtatttaatgtgcggtcggcgtcttctcaggataaacccgaacatgaggataaagctgcatctgcggctggcattcctcaggttcaggaagaagaagagcctgagcaggttaaagccgatcagcaagatccgttcgaaatgaatgatcaaacctatcgggcgatcctgcaaaaacttcaacaaccaaaagaggaaaaaaaatatcccgagaagacggaaatggacgatatggattaccgaaacgcattaaaatccatgaaaaaacgggaacaggattaaaggcaaattcgctgggcaccagcgggtttgcttttttatttgcgctttttttgcaatattacttccgattccccccgcactactgatgcagtactctgatacagctcggtctggaagggaagacgcagctttagttataaattcgaacaacaatgcgttattgctgttgtataccaattgatatttcgcgctagtttattcattttcgagctgattgtcagaaacgttctgatccgaagcagcaacagcctgttttccgcgtcatttgcttctcgtcaatatcgctgtctgtttaggctgcgtgtttttttccacatgagtgatgttctttcgaacgatagatgagcgctcagaaaatattcggctatcaaaaaatcatccgggacatttccttgttgatctacgatgcttatggattattcgaggcgctgttcatcaagagcggcttattccagaaagtgcagagattctggagcatttctttaaatgctgatttcaaatttcatgatgaacagctagaaaggagacgaagaacgtctctattcagagcttgatatgttctgcgtccatttcgggtcaaggatatattcactattatgaaaccaatttttccgatttccgtataaacaaagcgtggaacctgttaaaggacaagaaaaatcgacagggatataaaaatcggcaagctttccaaagggaaccggggcaggctgaagctagcgctcacattggcgagcgatgcagcggtcgtgctgtttgatgaaccatccggtctccgatggtgagggagtcgacagtcaaaagccttcttacatatttggagcttgacaagcagacaatcgccatcgccacctatgaaattgaacaaatattggatgtcgtcttaaatggccgaattgaagcaaaaaaggatgtcgaacagctgcgcgaggaatccggaatgtcgcttttggaatggctgaaacggtttattaaagaaaaaaattgaaaaagcgggaggagaaacattggaaacacttttggaattaaaaaatgtatcaaaaacgatcagggggaaaaagatcatcgagggcttgagttttgacgtgcgggcaggcgagatattcggcttcctggggccgaacggcgccggaaaaacgacgacgatccggatgattgtcggacatatgagcattaccgccggtgaaatcgccgtgtgcggcgtcagcgtaaaagaaaactttgaaaaggctgcacggcatatcggagcgatcgttgaaaacccggagctttataaatttttaacgggctaccaaaaccttcagcaatacgcgcgcatgacgaaaggcgtgacgaaaaagaaaattgacgaaatcgtcgagctcgtcggattgaaaaacaggatcaacgacaaggtcaaaacgtattcgttaggaatgagacaaaggcttggccttgcccaaagccttttgcacgatccgaagctgttgattctcgatgagccgacgaacgggcttgatccggcaggtatccgggaaatccgtgactatttaagaaagctgacgagagaaaagggaatggcggtcatcgtttcaagccacctgctttcagaaatggagctgatgtgcgacaggatcgccattattcaaaacggaaagctccgggatattcagcatgtgcacggacccgctcgggatgagaagaagcgctattatattcaagcggacgacacccaggctctcacacgggaagcggctgctttcagaaaggtgaaggttgacgaagcggaaggcgggatagagctcagcattcaaaaggatgaagtgcctgatttgattaaacacttgacagacagcggtgttcgcttatatgaagtgaaggctgtgaacaaatcgctggaagaccgattcctggaaatcaccgcagataaggaggaagctcagcatgtttaatctcatcgtaattgaatggatcaaaatttttaatcgaaaaggcacatacgtcatgatcggaattttgctgttagctgtcatcgggctgggcgttctcacaaagacgatcggagagacagaccaaaacacggactggaaaaaggaattggcgcaggaaaataaggacatgaaggaacagcttaaagggaacagcaatccaacacttgaaaaaattatgaacagtcgatcgcaattaatgagtatcgaatcaagcacgatttaccggcagatggggattattcagctctgtctttcatcagcgatacgagcgggctcatctcgctcgccggtttgtttgtaatcacggtggcggcgggaatcgttgcgaatgaattcagctggggaacggtgaagctgcttgtcatcaggccgatcagccgctttaaaatcctgctggcaaaatattttacggtcctgcttttcgcattggctttgcttttcattctgttcgcaagcgcagggatcacaggccttgctttattcggggcaggcgacagcagccaggttcacttggtgtatgtcggtggaacggttgaagaaaaaagcctgctattgcatttggccggcagctatttgctgaattcgatttcgcttttgatgatggcgacaatggcctttatgatttcagcggttttcagaaacagctcgctcgccgtaggtatttcgattttccttttggttatgggcggaacggtgacaggcctgctcgcgacgaaatttgcttgggcgaaatacatcctgtttgccaacacggacctcactcaatactttgacggatctccggttgtttcagacatgacgctgggattctcgattgtgatgctggctgtctattttatcgtttttcatgtgctcgcctttgttgtattcacaaagagagacatcgcttcataagcggtatacgtttaaaaaaagcctgacaccggtttccgggcgtcaggctttttttaaatataaaaagactgctgacattcggtcagcagtcctgtatgaagatcagcggttcacagcttacgcttttgttacgttagcagcttgtggtccgcggtttccttcaacgatttcgaaagatacagattggccttcttccaaagttttgaagccttcgccttgaatagcagagaaatgaacgaatacatcgtcttgtccttcaacttcgatgaatccgaaacctttttcagagttaaaccattttactttaccttctagcatgaaatttcctcctaaagcgataacgcttaaattcactattcttgctctaaaacaaacttccaagacgaaaactcttacaaaactttcttcttaaagatagttcgaacaaaaataattacctttactttaccagtgtttaaacgaaattacaactgctaaacacaatttttttaaaaaaagtgaaatttaatgctcagggtgaaaaacaatgagtaaaaagggagtttttgaaattttcacgaatctgattgacaacatttcaaagaagctgtaaagttaggtaaaacttcatgcaactatacttcttattcagagaggcggagggaattggccctgtgaaacctcggcagcgggttctgcatacagcagaatactgtgccacatccaacaagccgtacgggcttggaagataagaagagagcggactcactctatttactttgtgtcgtcaaaggcttcttcttattttttaagaggaagccttttttgttagccctaaaagaggaggagatcatcatgattacatttgaaggcgttgaaaaggtctatgaaagcggcggacagaaggtccatgcgctcaatggaatcgaccttcatgtggataaaggggaaatatacggcgtcatcggcttcagcggcgcaggaaaaagcacgctgatccgctgtgtgaacttccttgaaaaaccgacggccggaaaggttttcgtcggcggaagagacttaatgtccctgtcgaaagctgagatacgaactgtgaaaaggaagatcggcatggtttttcagcattttaacctgttaaattcaaagacgattttcgctaatgtcgctgagccgcttgcgcttgttaaaacaccgaaagccgacataaagaaaaaagtgacggagctgctccgttttgtcggacttgaggataaagcccgcgattatccggatcagctttcgggcggacaaaagcagcgcgtcgggattgcccgggcgctggcgacaaatccggaggttctgctctgtgatgaagcgacatcagcgcttgacccgcagacgaccggcgatattttgaagctgctgaagcgcgtcaatgaacaatataacatcacgattctgttaatcactcatgaaatgaatgtggcaaaagaaatctgcgacaaagttgcggtaattgaaaaaggaagaatcattgaatccggcagtgtgtttgacgtattttccgcgccggaaaccgaaacggccaaaagctttgtcaaatcagccatcgaccacgagatacctgaatcgattcaaaaattaaatctgaagcacctctaccagcttcaatttgtcggcgaatcttctgggaagccttttctttctcaagtgtcaaagcggtatgacgtagaagtcaacattctgcacggaacgattacagagcttcagggaattccgtttggcagcatgacggtcgagctgcagggggaagatggtgaaatcgggcgggcgctcgaatatatacgcagggaaaacattcgcatcagggaggtataagcatgctagttacatatgaccaaatcattgacgcactggttcagacgattcaaatgacggttttttcgcttttattttcaagcgtgatcggcattccgctcggcattttgctggtagtcacaagaaaggggcatctgcttgagaatccggcagtttttacgtttgtcaatatgatcattaacattttccggtccgtcccgtttatcattttaatggttgctttaattccagtgacaaggctgattgtagggacgtcgatcggcacatcggcagcgattgttcccttgactttttatgcggggccttacatcgctagactcgtcgagaactctctgcttgaagtggatccgggagtcattgaagccgctgaagcaatgggagcgactccgagacagatcatcttcaggtttctgattccagaagcgctcggttcgcttgtgctgagttttacggtggcaacggtcggattggtcggggcgtcggcgatggctggtgcgattggtgcaggcggtcttggggatttggcgatcacatacggctatcaaagatttgacacgctgacgatgatcatcacggttgcaattctcgtcatcgtagtgcaaggattgcagacatccggaaacgttctgtcaaaaaaattgagaagaagatagacagagagggagacggctattatgaaaaaatttgcatgtgttgtgatcttcctgctgcttgcggcagtgatcgcggggtgcgcggcagactctgatgcgaaaaccattaaaatcggcatcagcggaacggatacgagaatttgggactttgtgaagaaaaaagccgaaaaagaaggcttaaagcttgaaatcgtcaaatactccgactatgttcagccaaaccaggctttggcgagcggcgacattgacgccaacgcttttcagacgatatcctactttaatgcattcaaaaaggaacgcaaccttgaattatcgccggtcggcacaacgatcatcgctccgatgggcatttattccgagaaatatgattcgcctggcgatataccaaacggcgcggaaattgccgttccaagcgaagcgacgaacatgggcagagccttgcttctgctggagtccgccggcctgcttcaattaaaggacggatttgacggaaatggaacgcttgatgcaattaaagaaaatcctaaaaaactcaaaatcacaacggtggccgcagagcaaacgccgcgcgtgcttgccgatgtcgctgcatccgtcatcaacaacggcatagcggttgacgccggcttccatcctgtcaaagattcgatcaaactggaagatgaaacagcgacaccgtacatcaacattattgcggccagaacagaagaccgggatcgcgaagatttgaaaaagatcgtcgagctgtatcaagcagacgacactgctgaattgattaaaaaagaatttgacggagcacagctgccgactttcgttcctctaaaagacatcggcgaataaaatgtcagtcgcgcaattgcttcccgggtcatatattgaaatacatcgataattcctacttgaccaatcaggtttgttgtactatagtttttaaatgtaaaaaattctgggggtgcttttgttatcatgacattatttgttgttattaatattatcgtcatgctcggcctgatggcgctcctttatatgatgcaaaaaaagcatgtttctttttctaagcgggtatttaccgctctgggaatcggaattgtttttggattcgctttgcattttatatatggttcgtcttcagaaacgattacgcagacttctgattggtttaatatcgcaggcggcggctatgtcaagcttttgcagatgatcgttatgccgcttgtattcatctcgattttgggtgcttttacaaagcttaagctgacgcacaatatcggaaaaatcagcggattgatcatcgggctcttaatcgcgacgacagccgtcgctgctgcggtgggtatcgcgtccgcgcttgctttcgacctgcaggccgtccatgtggaccaaggccaggcggagacaatgagaggggcggaactcgaacagaaatcgcaggacatggaagccaaaacgcttccgcagcaaattgtcgagcttcttcctggaaatccgtttttagactttactggagcaagaccgacatcaacgatcgcagttgttatttttgcggctttccttgggatcgcttatctcggggtcaaccgaaaacagcctgaacaagctgaacttttcaaaaaaatggttgatgccgtgtatgcgatcattatgcgtgtggtcaccttaattctgaggttgacgccttacggtgtattggcgatcatgacaaaaacgattgcaacgagcgacctcgacagcattgccaaactcggcaaatttgtcatcgcttcatatgcggcgctgatcgtcatgttcatcattcacctgctgctcattacattcagcggtttaaatcctgtcacatacttgaaaaaggcgtttccagtttttgtattcgcgtttacatcaagatcaagcgcaggcgctttgccgctgaacattaaaacgcagcgaagccttggtgttccagaaggcattgcgaactttgccggatccttcggactgtccatcggtcaaaacggatgtgccggcatttaccctgcaatgctcgcgatcatgatcgcgccgactgtcggccaaaatccgcttgatccgtcattcttgttcacggttatcgcagttgttgcgatcagctctttcggagtggcaggcgtcggcggaggtgcgacctttgcagcgcttctcgtcctttcggcattaaacatgcctgtagcgcttgccggacttctgatttctgttgagccgctgatcgacatggggcgtacggctctcaatgtcagcggcagcatgacgtcaggacttgtcacgagcaaagtgacaaatgagcttgaaaaagacacgtaccaagaccgtacaaatatcattgaagcagaagtgtaaaagaaaaacggcccgcacagcttgagagctcgtgcgggccgttttttatgaatagctttgatcgtcatcgaacatcgtctgagctgcagcctgatcgttcatgacattcaccggagcagtcatatggcttgattgatgctggtcatttgccgtatggcctgactggcggtgttcatgtgattgtcctcccggattaaaagcctgcttgatcatgtcagccggattcatcatcgtctgattgcggccgcttccttgctgccgtcctctcatgccattcgcgaacatgccggtcaatcttttgcggatttcgggagaaaaagccgcggttaatgcagctgatcctaaaactaatacagcgggatggatgccagatcttcttctaaacaaagggtcaacctcctttttacgtataccatccccagtcatgatcggttttattcttcaaccttggccgcgtgatataagcggtgcttttcaaaaaattcgaaaatggcgcggtagactttcattttattttcttttttggaaaaaccgtgcccttcattttccaaaacgagatactcgatattccgctccatgttcctcaactgatcgacgacctgatcggactcttcctttacgacgcgcggatcgtttgcgccttggatgatcagtatcggctgagtcatattctccagatatgtaacaggagaatcggctttcattttttcataatcccgctccggattgccgacccatttttccatcatcggctgccagaaatcaggtacggttttgacgaacgaaaacaggttgctgactccgcatatatcgacgacggcgcggaaatactcaggatgcctcccgtggagcaaaagcgacatatatcctccatagctgccgcccattaaaaagagtttttcgcggtctgcaagcttttgatcgataagccagtcgatgcccgcggtcatatcgaggcgcggcccgtctccccaatcttgttcaaccattttaaagaatgaataaccgtaattcgctgatcccctgaaattaggagcgaataactggtaacccatttttgcagcgagttgaaagagatcgtagaacataaaggtttctgcatcttgcggtccgccgtgcggccaaataatcgtccagccgttcgcttctaccggggagggcttaaacagcagtccttctattggcaggccatcaaaagaaggatatgtcacaacttcaggataagacagctcctgttcggagaaacccggaaccgaatgtttcgttaattgccgccattttgactgtcctttcgttaatacgtagagattagtcggcctggtcggcgttgagccgagaatgtacagcgtaccagaataggcgcagtgtattttcgaaatggatgtgcaagggcaatcgatctgccggctttgccccgttgctgtgttgtactcatacatcacctctttgacacctttttttccaatgagataaaggaaagttccattcgggtcagcgtggatggatgttaaatcagttttatcaatcgaaagcaccggcgtaaaaataccggatgaaacagtgtacaaggcaagatatgagaactcggcttcgtagtttgtcgtgacgaataaccgatcatcagatgcaaaatgggaagaataaaccatgtgaggcagcgtctcatccgggaagattcctgtcgtcacgccttcagctgtatggaccatacagacagaatggctgttgacatagtagacatgtatgctgacggctttctcgcccgggcttacatcagacagcattgaagttccgtcttttccttcaaaaataagctcttctttttcagtgagacaatcatatctgtatgtatttaaaaatgtcggattgtcctttgtagaggagtagtaaactgcgttttgcacagggatgggggcgaagtggcggtctgtttgatttccgtttaatgattggaacgtcccgttttttaaagaaagcttgtacagtccgctttgttcgtttccgtcattgtcaaaaccagcataaaggattgagccgtcgggattgtaggcaattccttttgagtcctgattcaagaatgacagctggtacgggtatgtatcgggaagatccatcgcccacaggttcgatgttccgttgaggtttgtatcaaaaataagctgagtctcatcgggatgtaccgcaaagtctttaatgcgcagcgcatgcaaaatgctatccgctttttccatttcatatacacctccggatttatttggatattttttcgtccgttatgatcataataaaaaatatattttagacaaataaataacacgaaaaagaaaaaaactatacgtaaatcattaaaggaggcaattttaatgttcaatatgaaaaaaggcgcgattgctgctttgctccttccgctgctgttcacagccggatgcggcatggcaaaccaaggggcagataacaaccggcgcaatcaggacaatgcgcttcaaaatgtaacaaacagagataacgacgctacgaatgtcaatgacggcagaaatgtcaatgaccgaatgaatgtgacagacaaccgcgatgccaatcgtgaagacaataatatggaagtggcggataaagccgcagataaagtggcggaacttaaagaagtcagtagtgcaaacgtgattacgacaaaccgcaacgcttatgtcgcggtcgttttgaaaggcaatccgaaaggcaacttgacgaatgagctgaaagggaaaatctcgaaaaaggttaaagaaacagacaataacatcaacaatgtgttcgtttcggcaaaccctgactttgttgaccggatgagaaactatggcgacagaattcaaaatggcgaaccgatcgaaggactttttgaagaatttggtgaaacgatcaacagaatttttccgaatcaaagataatgaaaagccgcaatccgcggctttttttattggctgctttcagacagggcacttcctgaatcatcccgcatagagtgtagtacagaaaagtatgatgcggatggagggataataagtgacgggggagatgaaagcagcctttgttttaatcatggcgggcgctctatccgctctgttattggccatttttgtcgtgttcagccaagagagccctgaggcggctgtgctttcgggaaaaaaagaaaaactgaaagaatcgctggaaatggtcaaatatgaaagtgtcagcatttattacgctgaaaaagataggccgattctggagctgacaaaggaaacgcttcgggatgccgctgatatgaatcgggaactgtttgtcagtcctcttcaagacagcgttgatttgatctttttttcaaaccgcgatgatatggagtcattttcaaaattaaaggatataaccggattttattcaaacgatatgaggatgatcgggcttttgcccgaggagaggaagcatctgaataacggcgagggattcgccgtcttcctgtacaaacgggtgctggtgcatgagtatacccattatgcttttcacgtcaagctgagagaactgaatgccgacccgggaacttatccgctctggtttcacgaaggagtagctgaatgggcttctgctcatgacgcgatagaaatccggactttgccttcagtcgtccccttgagcaagctgaagaccgaccggcaatggcaaaaagcccggactggatatgaaaccgatatttatttgcaaagttattatttgatcgaagagcttgcggagaaaaaaggaaggggcgtcatcctcgacattatcgaggaaacggctgagcggggaagttttgcagacggatttaaggccgccgtcggccagtcgttgacaggttttgagaaagaatttaaacgaaaatacgaagcgaaaaaaacggcgttgaagtttcatcttcaatgccgttttcatgatcaatgaataggtctctgctgcccgcttggaggcatttgcggctgaccttgcacctgagcgaatgctgaagtcatcttctgcatgtcttgcggcgcaagctgaggaacttgatagtacccgtgtttgttttgataaaggaaaatttcataagccatttcgatatagtgaggaatctggtctgccagaacccttctgcagacagggtttgtcacttcgggagccgccatggccagcgacgaacaacaagttttcatcaagccgagcataaagctgctgatgcaggcgtcatcaatagcctgcacagattgcttcggttgtttcggctgggcatcttttaaaccgtagacgaatttgcggtcctctttcatcatatacgttgccgtttcctgactcggcttttgccccgttctgaaacattctgtcgtaatgttgtactgagacgaaataaaccgatgctgcctgtccaaaatgtcgagcagctccggatctttgacatgctccctgaacatcatatactgctcaaggacgccgatcattccggacagcacttcatgcatgtcgaacacttcgtgccccccgtgattcatatgctgcataccttcattgccttgattgatctgcatttgcggctggttttgctgttccactctaacgtatcctccttaaatgtaattcaactattatatttcgtttttgccgctatgtttattcaaaaaaggaataatcgataatctggatttaaagggattttattctaaccgtcgaatagtttagttcagaagaaaatattatgggggtcttgtattcaagacagcacatcatatcattggtcgaaaatggggataacggtcatcttggcgccaaactgagtattaggagaggaaattcaggccgattttgaaatccctcgcacctttgtaaacggagcacaatctgccgggcgatgatgaaaagttcacgcgtgtttccggcagtttagaggaattcggtgagtatatggatatctgatatccgaaaaacaatagggccggaacatggccggattcaaataaaggctgccggaagaataaaagacaatgtcggtctgtgtgctcatgcaccttttgttcagaaacgaccgaaaaacaattgaatagcaatgcccggctcgatatcggcatgaaagcatctggcttctaatgcctgcaactttttattgcccctgcgtgatctgtaaaggattctccctccgtaaacgatttcagctgccaatcatcatgaaatgcaaaaaaggtgttttcctttttgattttgcacttagaaaaggaggagttttataatgctgggctcaagtgagacggttggaaaaaagtcaggtttatttggtaatgattctgtgtatccaaaggtgcaaacagaagtatataaaaaaatcaatgaactgagtggttttcataggctggatgatatttatctttccttgatcgacaagtatatgtttccttgtctgatcctgaatgaccggggagaaattgtcgcgtcctcggaaagtgctgatcaatatttgaaaagctcaaaaggcagcattcatcaggtttttcccgcgagcttatccgtacaggtcaatgccgcgttacagcgggcgaagaaagagaaaaaagaagtatcgtttaaaaacgtcccgatttatttaagcggagaactatcctttgttcatttgagattaaaatgtttcttccgccagtatcacaagctttatgtgctgtttatcgaaaaagcacaagaaggggcagccaacgcgccggtatccggcggagaggacggacagcttcatctgcaacatctgtaccggacggtaaaagagctcgaagcgtccaacgatgctttagtgtccgcaaatcaaaagctgcaggaggaaaacagaaaattgacggcgctcaacagggcgtttgaaaagaaagtgaacgagctgaacacccttaaaaatgatatgaacaatctgctgaccagcacgaacatcgccgcagtttttttggatcaggaattgaaattgaaattatttactccagaagccgccaatatgttcgacctgaaaaacgaggacctttcaagacctgccgataagctgacagagaggtttaagtatgaagggtatgccgatgacttaaggcgcacgctatatgaaaacaagacggtcgtaaaagagtttgaaatgccagacggcggctggtatgccgtaaaaatgatcccttattatacatcgggaaacatggttgaaggcattgttgtcacattcacgaatgtcactgagctgaaaatgacaaacgaggcgctgcatatcagctcacaagctatagatcaaagtccggccaacatattgatcacttcggtcgacggttcggtcacttatgcaaacaaacgcttttgccggatgttcggaaaacatcaggatgacatcatcggcggcaatgtgtttgatatttaccgcaagcattttcactgtgaggatctcactcgcttctggaaacgcgtccttgaaaagaaaccatggtcaggagaacttaattaccaggatgaggagcagcaggacaggtgggagcaaatctcccttgttcctgttgaggacagcgcggggaacgttcagcaggttatgctgatatccgaggacattacaaaccaaaagcgatctgaaaaaatgctcatgaaatcggaaatgctgtcggcggtcggccagctagctgccggaatcgctcatgaaatacggaacccgctcacttctctgaaagggtttctccagctgatgatccaatccaaaaaatatcaaaaagactatgcggaagtgatgatgtccgaattcatcaggcttgaagcaatcatcaacgaatttctcgtattggccaaaacgaaatcgaatacatttgatccggttcaggtcaactcgattgttgaagatgtctgcatggtattggagtcgcaggccgtgctgaacaacgtaaggatcgagaaacagctgagcggagatctacctgagattctcgctgtttcaaatgagctgaaacaggttttcatcaacatattaaaaaatgcaatcgaggcgatggaggatgctgaaggctttattacgatacgttcctattttgaaaaagacagcgtattcatcacctttgaagatcagggaaagggcatctcaaaagaagtgctagaaaagcttggggagccattttatacaacgaaggaaaaaggaaccggtctcggattaatggttacatttaaaattattgaaaatcacggcggaagcattcatttcgaaagcgaagaaggaaaaggaacgatcgtaaaattgaagcttccgattaaagaatgagaatgcggtcatccctattctcattcttttttgaaatttttacaaaaaaatcatatagcctttataatcatcagataaatttgacaggaagcaaaaaacgggaggcgaatatatggtcaatgttgtaaagagccgttttatggctggtttgacaatcacgtttatgatgattgcgtcttttttgacgccgtttgcggacgtaacgcacgcttcagaaacgatttcagtagaagaagccattaagcataacgaagggcatgcagccgttgaaggctatgtcgtcgggcacacaatatcgagcggccattatcgtttcagcggaaatttcgctaacgattataacgtcgcaatcgctgataaaaaggaggaaacatcacctgagaacatactccccgtgcagatacccgcacctttcagagaccagttcggtttaaagacaaaccctcatctcatcggaaaaaaactcatcatcgaaggcgaacgcactacatattttaattccccgggtttgaaatctgttcaatccatcacattttccggagacgatgcaccgtctgcccagccggagaccaaaacgatagccgaagcgcgcaagcttttaaatgaaacggtcaaaatcaaaggaatcgtcactgccgatcaggcggctgtcggaggaggaaagctgtccacatttatccaggacgatacggcgggaatcaatatctattccgctgcgcaaggcgattttccggaactaaaagagggtatgtctgtttcggtcacggggaaaatcacgacatacaaaggcttgacagaaatcgtacccgcaccgtcaggcattgaagtaaccagagaaggggcggcactgcccgaccctgttccgctgactattaaagatgtgctcgatcagggaaccgcagctgaatacgaaggccggcttgtgaggatgaaaggctttattgaaacaaagccggatgcgccggcaggcggcggctataatatcacaatgatcgatgaaaactatcatccgctcacactaagggtgatggaacaaacgaatgccgccgcttcgatagaacaaggacaatggtacgagattaccggcatattaagccgctatgatgcggtgcagcttctgccgagaaaacaggaggatcttcggaaattagacggcgccgcgcatcctccccccgctgctgaaggggaatacgaaagcgttgtggaacgagtcgtcgacggggatacgatccacttaaaagagcctgttctcggatctacaaaagtccgctatgtcaacatagatacagccgaaacttatcataagccgaaaaatgaattagatgaaaaccagctgcagcacggaaacaaggcgaaggaatatttgcagtcgatattggccccgggagacaaagtcaccgtgaaagtgggcaaggaagcaaaagacagctacggccgcctgcttgcccaagtcatcactgaagacggcgtcaatacgaatttgcagcttgtccaaaaggggatggctgtaacctacttcatttggccggttggaagtgatgaagactatcaattgtttcaaaacgccgtcaaaaaggcgaaaggcgataaaatcggcatttggaatcccgctgatccgctcctcgaaatgccgtttgaatttcgcgccagggagcaaggcaaagggctgacgcggcatgtcggagactctccggaaaatacgtatgtcgcgcctgaaaagtggcgggagattccggtggaaagacgaattttctttgcgtcggctgaagaagcggaagctgcgggctattcgaaaaaagagcaaagcggcaatattccgctgcgcctgttaagcatgaatgatctgcacggaaagatcgatcagcaatatcagctcgatctaaacggcgatggccggacggatggaacattcggcaggatggattatgcagcatcattgatcaaagagaaaaaagccgagcaggaaaacacgctgatcgtccacgcaggcgatatgatcggaggaagctcgccggtttcttccctgcttcaggacgagccgacagttgaagtcatggaggaaatcggatttgatgtaggaaccgtcgggaaccatgagtttgatgaagggaccgaagagctgctgcgcatgttgaacggaggcgaacaccctgaaggcaaagggacaaaaggttacgacggacaggatttcccgcttgtctgcgccaattgcaagttgaaggcaagcggggacagctttcttcctccatatgaaattattgaagttgaaggagtgcctgtcgcttttatcggcgttgtgacacaggcggccgccaatatggtcatgccagaaggaattcgctcaattgaatttacagatgaagcaaaggccgtcaaccaggctgcaaaagaactgagagcgaaaggtatccgggcaatagcggtgctcgcccatatgacagcttcacaggacggcggggttgtgaccggcgaatcagccgaacttgctaaaaaagcagatcccgagatcgatgtcatctttgccggccacaatcatgaagtggtcaacggccaagtcaatgatattttaatcgttcaagcatacgaatacgggaaggcaatcggtgtcgtcgatcttgaaatcgaccgggaaacgaaagacatcgttcacaagaaagcggaaatcgaatatgtgaatcaggaaaatctcaagcccgatccggcggtcggtcagatactggataaatatgagcggatggttgcgccgatcatcagcgagaaagtcggtgaggctgcgcacgatatggccggcggctattcaaatgacggagacacccctctcgggaatctgattgctgacggtatgcggcaagcgatgaattcagatttcgcattaatgaacgggggcggcatccgccaagatttaaaaaaaggaacgattacatggggagacttgttcaatatccagcctttcggcaatgtactcgtccggcttgaaattaaaggcagggatttatacgatattatagacgcgcaaatatccccatcttacggcccggattactcgatcagcggcttcgcttatacatgggacccgaaaacaaataaaaccgcggctatttttcttgaagacggaacaccgattgatttagaccaaacatatacgctgaccgtaaacaactttatggcatctgcttcaggaagcaagtatttgccgatttccaggcttggaaaaaatccggtcacaggtccggaagatatcgaagccacagtcaaatttgtcaaaagctttaaagaaccgatcgcttatactgccgaagggcgaatcaaaaaattagcagaagatgattcgcgtccgggagaacagcccggacgcggggctgatccagatgacaaagaaaaacccggaagcggaggcgctgatccgaatgacgaagaaaaaccgtctggtgataagggcgatggggggaaacccggcaatgacaccggagaaagtccggttcatgacggtaccggcaatgcttcaaggagcggcgctattcctgttgcgggcatgacgaccggtgaaggatcagatgcgcctgcggagaagatggacggtctgtcaaatgatgcgtttctgccagacgagcgtgaagagcgcaagctacccgatacggcggcagcttacggcggtttccttttatacggcttcctgacgtttatgttcggagcgattctttatatgcggaaaaggggtattgcgagactatgaaagtcaagatgttatcgtttctgctgatgatagcggggcttgccacttttgcatacggcggctggaaaatattcgatatgaacagacagacggatctttctttaactgaagcaaaagaagccattgcatcgagtcaatccgcccgttcggctaaccacccatcggcgcccgcttcatttaagcccgccgccggcgaagcggcaggcatactccatattcccaaactgggcgcagagcttcccatcgttgaagggaccagtcccgatgatttggaaaaaggcgtcggtcattataaaggcagctattatccaaaacaaaacgggcaaattgttctttcaggccacagggatacggtttttcgcagaacaggggagctggaaatcggagataagctgaaaatcgagcttccatacggaagcttcgattatgaaatcacacacacgaaaattgttgaccaaagtgacacgtccatcatcacgctgcagcgtgaaaaagaagagctgctgttaacgacatgctatccgttttcttatatcggaaatgcgcctgagcgctatattatttatgcaaagccgctgaaaggatgacaaaatcccaaacaaaaagccgttttgggattttgtcaacaatctgtaaggctgtcccatcgaggacagcttttttaccgtttaatcaaccgtgccgaacagtcgtccgatttcgtcttttaaatcatccggaagcagtgccgcgacagtgacacgttcttttgtgatcggatgggtgacattgatctcgattgcgtgaagagcctgtctctgaaaaagcccctttgaaccgccgtataaggtgtcgcctgataaaggatgaccgatgcttgcaaggtgaacgcgtatttggtgggttcggcctgtctccagctgaagtctgcacagtgtaacatcgtgacggctgtcatatcctttcgattcaaaatgggtgacagcgggctgtccggaatgggacacccttcttctgacggggtggtgcttgtctctgccgattggcgccgaaatggttcccgttttttttctgaatttcccttccgctacggctacatatgtccgcgccagttcttttctttgcagctgttcgtctaaaagcgcgtgggcgaggcggtgctttgcaaaaacgacagcgccgctcgtatccttgtccagacggtggacgtgccggacttttcgctcctccccgttcatttgaaaataaaacgccacaaggttgctcagcgtgccggtctggccggcttcattcggatgagtcgccattcccgccggcttattgacaataagcatgtgatcatcttcaaacaggacgggaagttccccgtattcagggacgattccgctttcttcctcctctctgagatcgatcatcacgctgtctctgctctccagccgaacgttatgattcaccgatttatgattcactttaactttctcgtttgcgatccagtattgaatgacaggcttcgatgctttcgcctctctttttaaatatgcatataaaagttcgccgtgatgccgtatgtctgcactgaagaataagccgtgatttttttggttcatttttactgctcctttctgtaaaaagcgttcaggaattaggaaacacttacctccacagcccattgtttatgtatgctattctgtttgaagagatttgaacaagggatgaagggtgatcgatttgcgaattgtaaaggcagcaactgaagaacaagaaatttatatcgaagagcttgtatcagagctgtatcaaatatttccattgtacttgaataaacaaaaaataaaagaactcaaaaagcagggcgcgcttcaattgaaagaggatgaatacaaaggaacgctcgatgaagcgtttcagattatgacaagcctgcaattgatccatgcattattaactaaggcgaagcgcaagtgggtgctcaaagaccgtgatctgttcgataaaaatagccgcaagctgaatgactgcggtctgtacttccctctaacatctgccgactttcatatcgtgaataccgagaataaaatgctgatgtaaaaagccggctaactgaagtgaaagagcttgttccaaatcggaaaaagctcttctttttatgaaaagatgatataagaaaaaagcggaaaacacaatgaaatggtgccaacttcctttttagcatgtgcatgacctgtacatactaacaaccgaaaggggtgcagtctattgacgacaatcagcaatgcgatgtctagacaagtggcaacaatttcttccaatcaaacggttcaagaagcggctgagttgatgagccgccataatgtaggtgcgattccggtcgtagatcaaggcgtattaaaaggcatgatcacagaccgtgatatcacgctcagaacgacagcggaaggccaggacggacagacacctgtttcaaacgtcatgacaacaaatgttgtttcaggaaatccgaacatgagccttgaagaagcatcacagctgatggctcaaagccaaatccgccgtctcccgatcgtcgaaaacaaccatttagtcggcattttggcgctcggggatctggcggtaaacgaattgtccaatgaatctgccggacaggcgcttacgaacatttccactccggcacggactcagtaagaacggaagagcttgcctcttacagcaggctcttcttcatttatacataccggtttttagtgtcttctcttttcaaggagcggcaagaaggatacaatgaatggtgcaaacagtcaaaaggagttgggctaaagcgcgatgattaaagcagtgatttttgattttgacggtcttattttagatacagaaacgcacgaatatgaagtgctccaggaaatttttgaagagcacggctcagagctgccaatgtcggtttggggaaatgtcatcggcacggccgccggattccagccgttttcttatctggaggaacagctgcaaaaaaaactggaccatgaacaactaacgaaattgagacaagagcgttttacgaaaagaatggaaaatgaaaaagcgcgcccaggtgtggaagcttatttgtccgcggcgaaagagctcggtttaaaaatcgggctggcgtcaagctcagattataaatgggtgtcccagcatttaaaacaaatcggtctgtacgatgatttcgaatgcatcagaacggccgatgatgttgaggaagtcaaaccgaacccggaactctatttgaaagcggcggaatgcctcggtgtgaagcctgaggagtgcattgcattcgaagactctgtcaacggatcaatcgccgcgaaaagagccggaatgaaatgtgtcattgtaccgaataaagtaacgaaaagcctgctgttcgagcattatgaccaccgcctggaatcaatggcggaaatggagctggaacagctgatcgaaaaaatctccgatccatcataaaagccagaggaggaatgggacgtgtccgaaaaactggatctttcccgctttgaaaaaaagatcgtcatccgcaatattgaagaaaaagatatcgacagcatcatcgggcttcaagagctttgttttccgggaatgatcccatggaaacgggagcatctggaaagccatttggaacacttcccggaaggccagttttgcgcagagcttgacggagaagtgatcggttcctgttcaagcctgttgatcaactttgatgaatatgacgacagacatacatggcaggatattacagacgacgggtatattacgaatcacaatcccgacggcttaaacatgtacggcatcgaggtcatggttcatcccgaatacagacggatgaagatcggccaccgtctctatgaagcgcgaaaagatctggcaaggcgcttgaatttaaagagcattatcatcggcggcagaattccgaactatcataagtacgcttccgagatgacgccgagggagtatgtcgaacaggtcatccaccaccagatatatgatccggtcctttcgttccagctgctgaacggattcaccatgatgcggatcaacccgaactatctcccggatgacagagcatcaagcaaatatgcgacattgatggagtggaataatgtcgactacttgccgcagacgaagcgctattacaaatcagcttttccggtgagaatatgcgtgattcaatatgaaatgaagcagatccattccttcgaggagttcgccaaccaagtcgaatactatgcagatgtggcttcagacgcaggagcggattttgccgtctatccggaaatctttacgacgcagctgatgtcgtttctggaagagcgctcaccgagcctggccgttcagcggattaccgaatatacagaagactatatcagcctgttcacagaccttgccgttaaatacaatgtcaacattatcggcggttcccacttcgttgaagaagaaggaaagatctacaatatcgcttacttgttcagaagggacggaaccatcgaaaagcaatataagctccatattaccccgaatgaacgaaaatggtggggcatcagcaggggggacgaagtgcgcgtctttgacacagactgcggcaaaatcgcgatccagatctgctatgacatcgagtttccggagctaggcagaatcgcaaccgaaaaaggggccaagattatttttacccctttctgcacggaagaccgccaaggctatttgcgagtcaggtactgcgctcaagcaagagcggttgaaaaccaggtgtacacggttatttccggaacggtcggcaatctgccgcaaaccgaaaatatggatattcaatacgcgcaatccgcgattttcgctccttcagattttgaatttgcaagggatggaatcgttggcgaatgcaatccgaacattgagatggtggtcatcggcgatgtcgacctggaaattctcagaagacagcggcaggacggaacggtccggcagctcaaggacagacgccatgacatctacaggattcattataaaaaatagcagattcgggtgccggccgcttgaggccggctttttcctgttgactttcagctttatttttcatatattgtaactattaaaaggaggtggaaaagatgaatcaaactggtaagcgcatgacggatatgcaagcccatctgtatatttgtcgcgcgattttttccggggaatgcgtattacgggatcagtctgcccttttttacacattaaattggaaaaaataccagtgagagacatctgcccacaatcggattttctgatgctgacggcggggtgtaagctctgccgtctttttaatgctcggtgtctcttcacgggatgcggaggaaagatggatgattatatgcagtttgcaacatgtcggtcaaacttacggaggacatacgattttcaacgggctgtcatgggacctgcaccaaggggagcgcgtcggtctgatcggacgaaatggggaagggaaaacgacgttgttgaagctgatcagcggccaaatgaaacctgatgaaggtcttgtgacatggaaaaaaggattatcaacagggctcttggagcagaatcccgcatgggacggcagcaaaacggtaaaagagctgctgtatgatgttttttcatcattatggaacacacagcagaagctttctcggatcgaacgtcaattggcggttgaaaaggacgcggaaaaactcagattccttttggaaaagtacggggctttgcaggatgaatttcagcgaaaaggcggctacggcatcagcgcgcaaatcgaacgggtggcgcacggcttgaatatcgagcggctattcaatgccgagtggcgggagttaagcggaggcgaacggacgaaagcgggtcttgcaaggcttctcctgtcagctccggatctgcttttgctggatgagccgacaaaccatttggatttaacatcgatcgaatggctgacgtcttttttaaagcagtacaaaggtactgcggtcattgtgtcgcatgatcgctatttcctggatgaatcggttacttcgattctcgaaatcgaccaaggagagcttcacttttcaaaaggcggctatacacactatgctgatgaacgggaagagcgccttatgagagaatttcatgactatcaggatcagcagaagaaaatcaaaaaaatgaaggaaacaatcaagcggctgaaggaatgggcgaatcgcgccaatcctccgaatgacggcctgcaccggagagcgaaaagtatggaaaaagctttggagcgcatggagaaggtgaaaaaacccgttctggaacgcaaaaagatcgacttagttttcagcatggatgaacgaagcggaaaagatgttgtcaggcttgaggatgtctgcaaaagcttcggtgagcggcagctttttgacaatctcagtatgcatgtccgttttcaggagcgcgccgccatcgtcggagagaacggcagcggcaaaacgacgctgctcaacatcatcagcggaaaggaaacgccggacagcggtgacgtgcagcttggcagcaatttatcggccgcatatctgactcagcatgtcggtgaaatggaggaagagcgcaccgttttagccgaattccgtgaacatgtttctgcatcagaaggcgaagccagaatgatgcttgcaaagtttttgtttttcggccaatccgtcttccgaaaagtgaaagatttaagcggaggcgaacggatgcggcttcgcttggcacagctcgttcaccaaaatcataatgtgctgatcctcgatgagccgacaaaccatttggacatcgaatctaaggagatgcttgaagaagcattaagccaatttcaagggacgattattgcggtttcgcatgacaggtactttcttgaccggcttttcaatgtcatctggtggcttgacggcaggaaactcgtcaagtatgaaggaaactatacattcgcaagggagaagcggcagcagggttgacacatttttatcacatttgataagatgttgctacagttatagaagacaaaagcaatggaatgtatgcacgaactgtatatattctctttcaatattttaattctgcttgattttgttgtatgggtatgcatacaagttaggcagcattcgaacgcctgttgacacaggttatttgagtgctgccttttttttattgtctttctgccataactgtgagaaaagaagggataatggaggggtttagttagtatggcttttcgaaaaccggatgaaatagcgaatgcagcaattgaagcagggatgaaaaaagtacagctcccgctgccgtctctgcttgtattggggtttttaggcggcgcatttatcgcgcttggttatttgcttgatatcagggtaatcggcgacctgccgaaagaatggggaagcctgtccagcctgatcggagctgccgtatttcctgtcggtctgatactggtggtgctcgctggcgctgaattgatcacagggaatatgatgtccgttgcgatggctttattttcaagaaaaatatcactaaaacaattggcggttaactggggaatcgtcacgattatgaacttaatcggcgcactgtttgttgcttactttttcggacatttggttggattgactgaaacaggcccttatttagaaaaaacgatcgccgttgcacaaggaaaactagatatgagcttcggcaaggttctcatttccggcatcggctgtaactggcttgtatgtcttgcggtatggctttctttcggcgcacaagacggagcagggaaaatccttggcatctggttcccaattatggcgtttgtggccatcggatttcagcacgttgtcgccaacatgtttgtgattcccgcagccatttttgcaggctcattcacctgggggcagtttatcggaaacatcattcctgcttttatcggcaatgtcatcggcggagcggtgtttgtcggtctcatttattttattgcatatcctaagaaagaccgctccagaaaagaaatgaagcaggtatcatgaacaaagggcaaatccgctcgataaaacataaaaacgccatttttataaaaagatgattaaaaatagaaattggcggtatgtcccgcaggcagtagaggcattggtgtcttcttttgtctgcggtttttatttgcctgcggcagcttcggttgaagcggatttgagaggggctgagcgatatgatgattaacaaacggtttaaaaatccgtaagaattcgaaccgagatcagctacagtacgactgatccggaaagtggaggggtttttacttagaccaccgaacaacggatatggacattcgccgatgcctatgtcccgcctggaaatgtccatgatttctgtgccctgtcttgaccggttggatcaccaaattgctcctcacagccgcatgccagaacatgaagtagattgcatttacctagccaagcggagttaggtatgtgggagctcttactgtatttaaaatccgatgaatacctagagaaacaccgttgaaaacaaacgggtttttctatatgattgatagtattaatgagaacggttatacataaaaagaaggtgcatcatggagtttctgtttgttttactgccggttttcgggatatttgcgatcgggttcatcggacaaaagctgcttcattttgatattcagaacctatcgaaaatgtccctgtatttaatgtctccgtttttagcgtttgatacgttttatgagaacaagctgacgatggattatatttatatgtctgtctattgtctcggcctctgtttaactttgattctatttgtctacctcatttcatatgttcacggatattccaatcaggagcggtgcgctctcgttttatcatccgctttcatgaataacggaaactacggaactcccgtcgtcctgcttgtctacggcacggccgggcttgatatcgccgttgtgctgatggttcttcagcagcttgtcatgagcacgattggcatgtattacgcagcgaaaggaagcccagaagcgggcggatttaaaatcgtgatgacgagggttatccggatgccggtcgcatacggtgcgctgctcggcatatgctttcagctggggcatatttcgattcccgaacagttaatgacaggaattaaattggtgggagatgccgcgattccgacgattatgattattctcggcatgcagcttgcggtgatttcctttcaacatatcgaataccggaaaatttcttactcgcttttgctgaaattattcgtgtctccgctcattgccctggggtttgcgctgattcttccggtcgacgggctggtcaaacagatcatggtgttggcggcggccatgccgacggcggcgaacacgactttgatggccgtacagtttgaaacaaagccggaaatcgtttcaagcgcgacttttatcagtacaatgctcagcatcgccacccttccggtggtgctgtggctgctttcattatggggctgacctgaatttttctttcaggcggccttttttctggcgataacaaagggaagcttgcaccgcttaaaaaacggcggctgatgacaagggaagccgccgtttcctgagtttacccgtctatttgcaatgcgatatttccaaactgctccccgtctttcatccgtttaaaggccggaaccgcttctgataaaggaaatacttgatcgatcaccggcttaagggaatggcgttcgataaaatcaatcatttgccgaaattcttcgaggctgcccatcgaagtgccgatgatgctgatctgcgggaaaaagagcgagcgcagcggaagctggatactgtctccagagctggcaccgaaaatgacgatccttccgttcggtttaatgacatcgaaataatttgcaaaagtggcgggaccgatgctgtcgagaattaaatcgacccgttccccatccaagctttccttccacaggccgcggctgtcaattgcgaagtccgccccatagcggagcgcttcttttcttttttcttcgcttcgggaggttacaatcacccgcgcgcccgcggcctttgccatgagcagcgcatttgtggcgacgcctccgccggctcccggtatgagaatgtgttcgcctttttctaaatgtcctttcgtaaataaagccctgtaagcggtcagagcggataaaggcaggacgcctgcttcctcccaggaaaggtgcgccggctttttcaacacgtgcttcgccgggacgatgacatgctctgcgaaagtcccgtcagaggggccgccgagaatgtccggcacttgcggaacggaatccgtatattcccagccgatgctcggattgatgatcacctctgtatgaacggcgaggtcccgaacgccttcacctgtctcttcgatcatacctgctccgtcggatccgggaataaacggggcatcgcctgcctttctggactgaaaaaggaacaagtcgcggtggttcagcccggctgctttcagcctgattttgacttcaccggggccgggcgttttgtcggaaacgtctgtatatttcagccctgaaaggcccttgattccttcatggatgatcgctttcataaaaaaattccccccattcgagttggttgtgttaaattatggacatgaatgaaggtaaatgtaaaatgatttgcccggggccgcttagaggccttctgttttataaaggattgcaatgaggcggaaattccattagtgtaatacagaagcaagctagcaagtgaaggagatggaacatgagttttcacgatcaaaatattttacctgcggtacgcaatatgaagcagttcgatacattcctggacagccctttttcatacggggtgctgcttgacatccatcttggacagctgggaggcgtgatcagcgcggcaagatcccatgggaaaaaaatgtttgttcacgtcgatctgatccaaggaattaagcatgatgaatacggtgcggaattcatttgccaggaaatgaaaccggcgggcattctttctacgagatcaagcgttatcgccaaagcaaagcagaagaaagtgtatgcgatccagcgcatgtttttaatagacacaagcgccatgaagaagagcattgaattggtgaaaaagcacagacccgactatatagaagtgcttcccggagtagtgccggaattgatcagggaagtcaaagaaataaccggcattccgatctttgcgggcgggtttatccgtaccgaaaaagacgtcgagcaggcgcttgcagcaggggcgtccgcagtcaccacctcagacactgatttatggaaaaaatactggaactaaaaatttaaaatgtgaaaaattattgacaacgctttcactatacgatacgatcttactaagttaatacattgtgacggagacccggagaccacagcagttctttactcagtatgatgtaaagaaagtttgctgttgtttttttatggtcttttagacacagtggagaaggtgaacttatggcgttcatctattagaataatacttcataatagattttaggagggatagccttgacagcattttggggggaagttatcggaacgatgctgctcatcgtctttggagctggagtttgtgcaggagttaatttgaaaaaatcgctgtcccatcaatccggatggattgtgatcgtcttcggctgggggcttggcgtggccatggcggtatatgccgtcggcggcatcagcggagcgcatttaaatccggccgttacattggggctggcatttgtcggagattttccttgggaagaagtgccttcatatattttgggacagatgatcggcgcatttttaggagcggtgctcgtttttcttcactacttgccgcactggaaagaaaccgaggatcaaggcgcgaagcttggagtattttcgacaggtccggcgattccaaatacatttgcaaacctgttcagtgaaacattggggacttttattctcgttctcggacttttaacgatcggtgcaaacaagtttactgacggactgaatcctcttgttgtcggatttctgatcgtggcgatcggtatctcgctcggcggaacaacaggctatgcgattaaccctgcccgcgatctggggccgagaattgcccattttgtccttccgattgcaggcaaagggagttcaaactggaagtacgcgtggatccctgttttaggaccggcgcttggcggttcatttgcaggcgttttttacaacgccgtattcaaagggcatatcacaaacacattttggattgtaagcgttatactagttgtgatattgttaggtttctatattcatatgaaaaaacaagcagttgatcaatcggtcaacatttaaaaaaaagcaatcttaacagacatataagggggagtttcaaaatggaaaagtacattttgtctcttgatcaaggcaccacaagcacaagggcgattgttttcaacaaagcaggcgaaatcgtccatattgcgcaaaaggaattccagcaatattttccaaaccccggctgggttgaacacaatgcaaacgaaatctggggctctgttctgtcggtgatcgcttcagcgctttcagaatcggggatcgaagccggacaaattgccggaatcgggatcacaaaccagcgggaaacgaccgtggtttgggataaacataccggcaaaccggtctacaacgcgattgtgtggcagtcccgccaatcggctgagatatgccaggaattaaaagagaaaggctatgaagagacgatcagagaaaaaacagggcttttaatcgatccttatttttcaggcacgaaagtgaaatggatcctggatcatgtggaaggggcaagggagaaagccgaaaacggcgaccttctcttcggtacgatcgattcttggctgatctggaaaatgtccggcggaaaagcgcatgtgacagattattcaaacgcctcaagaacattgatgttcaacatctatgacctaaaatgggatgatgaacttctcgatattctcggcgtgccgaaatcgatggttccggaagtcaagccttcatcgcatgtatacgctgaaacggtcgattatcatttcttcggcaaaaacattccgattgcaggtgcagccggcgaccagcaggcagcattgttcgggcaggcttgctttgaagaaggaatggttaagaacacgtatggaacaggctgctttatgctgatgaacaccggcgagaaagcgattaaatcagagcacggcctgctgacgacaatcgcttggggcatcgacggaaaggtggaatatgcgctggaaggcagcgtcttcgtcgcgggttccgctattcaatggctgcgtgatgggctgagaatgtttaaagacgccaaagaaagtgaaaaatacgctgtaagagcagaatctgccgatggtgtttatgtggtccctgcatttgtaggtttaggcacgccttattgggacagcgatgtccgcggcgctgtattcggactgacccggggtacgacgaaagagcattttatcagagcaacgcttgaagcgcttgcctatcaaacgaaagacgtgctggacgcaatgaaggaagactccgggatcccggttaaaacgctgagagtcgacggcggagctgtcaaaaacaacttcctgatggattttcagggcgacattttagatgtccctgtagaacgtcctgaaatcaatgaaacaacagcgcttggttcagcctatttagcgggccttgctgtcggcttctggagcgatcgttccgagatcaaagaccagtggcagcttgacaaacgttttgaaccgaaaatggaagaaaaagagcgtgagagcctgtacaacgggtggaagaaagctgtaaatgcagctagggcttttaaataagctgcatgtatgttacaatctaattaagttaatagaaacggttggagaagaggagagaccgcagacaccaaagcagtatcagcgctttggatgtttgtggtctctttttctattttttaccgtgacaacaagggaggacatgaaacatggaatcattattttcaagccgtaaacgggacgacattttacagaatatgacgaagcagaagtatgacgtgtttattatcggcggaggtattactggggctgggacggcattggatgccgcatcgcgcggaatgaaaacggcgctttgcgaaatgcaggactttgcagccggaacgtcaagccgttccacgaaacttgtacacggcgggcttcgctatttaaagcaatttgaagtgaaaatggtagccgaggtcggcaaagagcgggcgatcgtctatgaaaacgggccgcacgttacaacgcccgaatggatgctgcttccgatgcataagggagggactttcggcaaattcagcacttcaatcggactgagggtgtacgactttttggcaggcgtcaaaaaagctgagcggaggagcatgctgactgccgaagaaacgcttcaaaaagagccgctcgtgaaaaagaacggcctgaagggcggcggctattatgtcgaataccggacggatgatgccagattgacgatcgaagtcatgaaagaagccgttaaattcggagccgaggccgtcaattatgcaaaagtaagcgattttatatatgaaaacggcaaggtcaccggcgtggtcattgaagacgtcttcacgaaaaaaacgtaccgcgtctacgcgaaaaaaattgtcaatgccgcggggccgtgggtcgaccgtctgcgggaaaaagaccattcaaaagaaggcaaacaccttcagcatacaaaaggcgtgcatcttgtttttgatcaatcggtctttcctttaaaacaagccgtttattttgatacgcctgacggccgcatggtgttcgccattccgagagacggaaaggcatatgtcggcacaacagacaccgtctacaacgagaatttggaacaccctcgaatgacgacagcagacagggattatgtcatcaatgcaatcaactatatgttccctgaacttggaatcaaagccgaagatgtcgaatcaagctgggctggcctcagaccgctgattcatgaagaaggaaaagacccgtccgagatttcccgaaaagatgagatctggacttctgaatccggactgatcacgatcgccggcggaaagctgacaggctacagaaaaatggctgagcatatcgtcgatcttgtcagagaccgattaaaagaagagggcgacagagacttcgggccttgcagaacaaaaacgatgccgatttcaggcggccatatcggcggctccaaaaatctggaggcttttattcaagcgaaagcagccgaagggattgaggccggactgtccgaagagacggccaaacaaatcgccgcacgatacggttcgaacgcagaccgcctgtttgatcgtattccatcgctgaaagatgaagcagcaaaacgccgcatccctgtccatgtactagcagaaatggattacgggatcgaggaagaaatggcagccgtcccggcagacttcttcgtccgcagaaccggtgcgctgttctttgacatcaattgggtccgcacttacaaagagagccttacggactacatgagcgagaagctgaactgggatggcgaaacgaaggcccggcatgtcaaggcattggaaggactactacacgatgctgttgtcccgctggaaagcaaatgatttattaggtcaaataaccttggtgaattttcgttaataatcaatcgaatggcccggcgtgaggctgtcttgaacaggcagcctcatttttttcatttggcatgctaaatttggacaaagcggcggtttgtcgatatgataaaagaaaagctgcaattacttagctagaacattggaggtaatcatgagctggagaacgagctatgaacgctggagaaacaaagaaaacttagattccgaattaaaagcgcttcttttggaagcggaaggaaatgaaaaagaactagaggattgcttttataaaaaacttgagtttggtacagccggtatgcgcggtgagatcggaccgggcccgaaccgcatgaacgtttatacggttcgcaaagcatcggcgggccttgccgcatacataggagcgaacggcggcgaagcaaaaaagcgcggcgttgtgatcgcgtacgattcccgccacaaatcgcctgaatttgcaatggaagctgctaagacgctcgcagaaaacggcgttcaaacgtacgtgtttgacgaactgcgcccgacacctgaactttcctttgcggtaagagaactgaatgcgtttgcaggtattgtcatcacggcgagccataacccgcctgaatacaacggctataaagtgtacggagaggacggcgcgcagcttccgcctgctgatgccgacaaactcaccggctatgtcaatgcgatagaaaacgaactggaaatcgaagccggagatgaagctgctttaaccgaaaaagggctgattaaaataatcggcgaggaaatcgatcaagcgtatctcgataaactgacatcgatttctgtcaaccctgatctggcaaaggagaccgaagtcaaagtcatcttcaccccgcttcacggcacggcaaacaagtctgtcagacggggcctgaaagctctcgggtatgaacatgtcacagtcgtccccgaacaggagctccctgaccctgacttttcgaccgtatcttctccgaatccggaagagcacgccgcttttgaatatgcgatcagactaggagaagaaaatggagccgacattctgatcggaaccgatccagacgcagaccggctcggcgtcgctgtaaaggatcaagaaggccgctacgtagtgctgacaggaaatcaaaccggcgcgctgctcctgcattatctgctgtcgcaaaaacagcagaaaggcatgctgcctgataacggcgtcgttctgaaaacgattgtgacgagcgaaatggggcgcgacatcgccgcttctttcggactggacacgatcgacacgctgaccggctttaaattcatcggagaaaaaatcaaacaatttgaagcatcgggcgaatatgctttccaattcggttatgaggaaagctacggctacttgatcggcgacttcgcaagggacaaggatgccgtccaggccgcactgcttgccgttgaagtatgcgccttctataaaaagcagggaaaatcgctttatgacgggctcctcgaattgtataaatcgttcggcttctatagagaaggcttgaagtccctgaccttaaaaggaaaagagggagcggagcaaatcgcagccatcctcagcacattcagagaacagccgcctctttccatcgccggaaaagatgtcgtatccgccgaagactatttgacagggaagcggacgctgctaaaggaaaacaaaagggaaacgatcgaccttccgaaatccaatgttttgaaatatttccttgaagacggctcatggttctgcctccgtccatcaggaacagagcctaaagtgaaattttatttcgcggtcaaaggccgaaccaatgaagaaagcgaagcgcttctcaatcaattgacagacgaagtgatgaaaaaaatcgacgatattgtaaaagcgacctcaaattcgtaatcgctgaaaacccgcctttaaatggcgggtttttttattgtgaagagacgatgaatgatgtaatatatatttaacattaggtcatatataaattgcatattgaaaggagagaatgactgatatgaaatggatcaaaatcggggatgaatacatagaaaagaaaatgacgcaatttttcagcgaagccggtacgattgtcgctgccattttatgtttggatatgatcatccgcggctttattttaggaaaacctgcatccgaatacatcatcagtgccatcggttttgcggtctatgcaggctggattttgctccgctatcttttgtcgggatttgaatatccggagatcgcaggccaatcggcgtatcggaaaaaaagaaaagaaatcgcagccctcagcctcgcttccggcctcatatttgctattttaacgcttctctttaccggcataccagagcatcccggcagttgggttgactttattggtatggtgatgttgtttgcattccttcattttctgatcaactttatctcgttgcgcaattcctttcggaaaaatcaagatctattagatgattaaatcaaaacggcaggtgagcatatggttaaccgggtcaaactcgcccggatcgaaaagtctttgacacaagcccagctcgccgagcgggtcaatgtgacaaggcagacgatcgggctgatcgaaaaaaataaatacaatccgacattgcagctctgcatcgcgatcgcaaaggcattagacaaaacgcttgacgatttgttttgggaagaaaaagcctaaggatgagctttgccctttctcggtcaaaagtcttagaaaagatcatctcatgagggcgggcttttttttatcaactatcggtataatgaaagaaactccggtttaaggggatgaaacttttgcgggaagacacacagtttgaaaaattgaaaacgctcaaagaaatagcggaaactttaaacgaagggaacgatctaaaggaaacgctccatgccgttttaaagaagctgctccgcctaacgggactcaaaacggcatggctttttctgatcgatgaaaaggggagctttgaactggctgcttcggcccgcctgcctcaagcccttttcttaccggcaaaaccgtttactatgcgaaggaagctgctactgtcttgaacaatacagggacgaaaagctggacagggcgaaaaatatcatccactgccggcggattacgacggccatgaaacagaagacaggagatccggaaggcatcacccatcatgcaaccgtcccgctcagtgaccaaaagaagcggttcggtttgctgaacgttgcggcaccgggcaaaattcatttcagccgcggggaactggcgctcctcgaagctgttgctctgcaaatcgggatggcgatcaaacggatgaggcttgctgaacaacagcaaaaacacctgctgctgaccgaaagaaacagattggctcaggacttgcatgattccgttaatcaaatgcttttttcgctcagcttgaccgctaaagcggcgggggaaatgacagaccagccggaaatcagggaaatgctcgagtttatgcaaaatctttctcatgaagcgcttcttgagatgcgggcgttaatttggcagctcaggccccaggggctggaagaagggttagcggcggctcttgaaaaatatgcggaagtgctcggccttcaagtaatcttcaagctcagcgatgtgctccgtctgcccccttctgttgaggaattgatgtggcggctgagccaggaagccctcaacaattgcaaaaagcatgccggtgcaagccgcatacaagtgaaaatcaatgtattccagtcgtctgccgtcttggaaatcgaagatgacggcaaagggtttcagtacgatcctaatgtggacattccgacgcttgggctgaaaggaatgaaggagcggacggaaaaagcgggcggcacgcttttgatcacctccgcaatcggtaaggggacaaaaatccgggcggttttgcctatgaaggagaagggggaggcaggatggagaaggtgaaaatcatcattgccgatgatcatcatattgtcagaaaagggctcttgtttttcttcaaaacaaaaagcgattttgatgttatcggagaggcttcgacaggtatcgaggcgctcgatgtcttgcgaaaacgtgaggcagacatcgtattaatggatttatcaatgcctgatatggacggcattgaggcgacaaagcgaataaaaaaggaatatccgtctgtcaaagtcatagcgctgacaagctatgcggacgagagctatgtgattcccgccatccaggcgggagcctgtgcctatcagctgaaagacgccgagcctgatgaacttgtcgagacgatccgcgcagtttatggcgggagatactcattggatccgaacatcatgtcccacgtctttcaccatgtgtcacaggcggatgagaaagaaaaaatacatcaattgacaaatagagaaaaagatgttttattggaaattacgaaagggaaaagcaataaagaaattgcagcatctttatttatcagcgaaaaaacggtaaaaacccatgtatccaatctgctttcaaagcttggcttatccgatcgcacgcaagccgcgctttttgcagtaaaacacggactacaacaaaatgacgggagaggatgaccaaatgaaaataaccgtaattagcggaactgcgagaaaacagggcagaacgcggatcgccgcttcctatatcgcccgcgcttatcaggctgagcatatcgatctaagcgagttcatccttccgattttcaacggagacgaagagcaaagctcgctggagaatgttcaaaaattgaaagcttcggtcaaagaagcagacgctgtcgttttattatctcccgaataccacagcggcatgagcggcgctttgaaaaatgcactcgattttttaagcaatgagcagttctcgggcaaaccggtggcgctttttgcttgtgcagggggcggcaaaggcgggatgaacgcgctcgccaatatgcgcattgtcgcacgcggagtttatgcgaacgtcatcacaaagcagcttgtgctcgatccgattcatattgatgaggagcaccaaacggttactgaagcagccaaagccaatattaaaaatgtaatggaagagcttctgctctttgccgaatttcaaaaagcctgacgccgacagagcgccaggcttattttattttacgtaaagacaagcacgccgttttcgtgttcatgtccggaaaatgaggcgtgatcaatatactgcagcagatcataaagccttttttcgacaatggcgtcatctctttcaaaattgtaggcgtgcaaaaaatgttcgatccgctttgataataaatcgtcttctgtccgcaccatcaggatcagcaggttgtcccactgcgaccggtgcgtatagtacaaagctttgtcataatcagcgtaattcaatttcgccactctcccttctttctgaggagtcatgcttattttatgtggcggggtgtttttttctccgggcaaaacttggtctcccttgtttggcggcctagaaatatgaggatggtatatgcagaccgcgaaaaatgtctgcatgacattcgccgtttacggtcaagctaacgtatgtacaatacatgcggagcgaatagaaatgaaaaaacgatattgcacgtactttttttgcatattaacacttttatcattcccggcgaaaggccactttcaaacagatgttttcgatgcacctgaacggtgggaaagaatcgcctggagcgcgcttgaagaaaaatacaaaggcgcaaagctcgaggattatgaatatttagggcgcacacaagtaaatgatgaagagacaaaggatgtcttcagggtaaccgtcaatcaagaaggcaaatcattttcggcgcacgccgaggtgtattttcatccggtgaccaatgcgatcatcaatgtcaatatttttcccttatagcaaaaaaaacgaaggaaaccgtttccttcgtcaactcaataatttacgtatatggtcctgattcatgataatatcttgcagagtgtattggtccaatacgtccaaataggcggaaagggctttgtttaaaacatgctttaatccgcagatcggagaaagtatacaatggtttttttctccgttaaaacactcgacaaggttaaaatcatcttctgtatgtcttatgacttcaccgatattaatcagttcaggcgcttttccgagacgaatcccgccgttgcggccgcggatcgtttcaacgtagccaagcttgccaagctcgtaaatcaccttcataaggtggttttttgaaatggaataagaatcggcgatgtctttaatattgacaagctcgtttgagtttttggttgctagaaaaatcagtaccctcaatgagtaatccgtataatttgttaatttcatcgcatgacctcaatcaaacaagtttccattatcttatcacatttgccttcgattatgagggtcgagcggaaattgttacaaaaatataaaacattcattgataatattgctttaattccattaaaagtctagtataaagatgtatctaaaatacatctttaatcaaaagtaacagtcctatttaaaaaagatcttattgcacctttaaagatgtatttcaaatacatttttaaagtgactggagaggagcaggcgttatgctatctgaaaaaaccatgcaaattgtcaaatcgaccgcccctgttttaaaagaaaagggaacagagatcaccacttgtttttacaagcggatgtttgatgcccaccctgaattgaaaaacattttcaacatgtcccgacagcaaaccggcggacagccgaaagctttggcttttactgtgctgcaggcggctgaaaacatcgaccggctcgaagacctgctgccggttgtcaagcagatcggacataaacacaaaagtttgcatgtgaaaccagagcactatcctattgtcggtcagcaccttttggaagcaattgaaatcgtgctcggcgaagctgcgacagaggacattctccaggcatgggcagaagcctatgaagagatcgcccgtgtatttattgaagtcgaaaaacaaatgtatgaggaagacaaaaagcaggatggaaattgggaagggtttaaaccgtttgtcatcatggataaacgagtcgaatccgatacgataacctccttttatttgaagcccgccgatggaacggctttgcccgctttcagccccggacagtacgtatctgtctgcactaaaattccgggcgaaccatatttcttaacaaggcagtacagcttgtcagatgcttggaataaagactactaccgcatttcagtcaaattggaagcggaggaaggccaaccggtgggaaaggtatcaagctatctgcatgagaacatggaaatcggcggcagcttggaagtgagcgctcccgccggagatttcacactttccgaaggaacggatcgtccggtttatttcattagcgccggatcaggcatcacgcctgtcatgagcatggtgcaaacgttggctcaaaaagaaagccgccgcgagatcacattcgtgcatgccgcgaaaactgaacggcatcacgctttcaaggaagaaacggagaagctgctcggcgccaatccggcgaaccgtctcctgttcgtctacagcagaggtgctgaagcgacggaagagcatactgtaaaaggccgggtgaatgaagagcttttgaaatcggtcgtgatagatccaaatggcgaattttatgtatgcggtccgctttcatttatgaaaagcgtgattgaaggattgcaaaaccttggcgtttcgatggaaaacatccgctatgagagctttgcttcatctcttgatatgcaaatagcgaactaacctcaagaaggcagctgtcaaaccgacagctgcctcagcgtgtcgacaaaccctcgcatacgttgtcagtcctgcgcgtcggtgctcacgaattccaacattcgctccgctccgatgctcggccttcctagactgcaagggttttcaatcacgctgaaagaaggatgacaaaatcccaaaactaagagctgttttgggattttgtcagcaatctaaggcagctgtcaatccgacagctgcctttcatcttttcaaaacccggctcatacaataaagagaagtccaaccgggggggatttgagtattgagcatacgggagcaaaaagagctgcagcgggcgattgaagaaattacggaaatcgcggaaggattcggccttgatttttacccgatgagatatgagatttgtcctgctgaaattatttatacattcggtgcatacgggatgccgacaagatacagccattggagtttcggaaagcaatttcacaaaatgaagcttcactatgactttggcttgagcaaaatatatgagcttgtcattaattcagatccgtgttatgcgtttttgctggacagcaattcattgattcaaaataagctgattgtcgcacacgtccttgctcattgtgatttctttaaaaataactgccgttttcaaaatacgaagcgcgatatggttgaaagcatgtcggcgacagcagagcggattaaacattatgaaacggtacacggttcaaaagaagtcgaagcatttctcgatgcggtgctggcgattgaagaacacattgacccttcgctcgtgaggccgaagctgtcgtggagcgtagatgatgaagaggaagaagaaaccggcgcgccggccactccttatgacgacctctgggaactggatcataaaggatcgaaagagaagaagaaaaggacgaaaaaaaagtttccgccgaaaccggaaaaagacattctgctgttcatagaagagcattcgcgggagctggagccttggcagcgcgatattttaacgatgatgagagaggaaatgctgtatttctggccgcagcttgaaacgaaaatcatgaatgaaggctgggcgtcctattggcatcagcgaatcatccgtgagcttgatctgacatcaagtgaagcgatcgaattcgccaagctgaacgcgggagtggttcagccgtccaaaacgggaatcaatccttattatctcggattgaaaatatttgaggacatagaggagcgctacaacaacccgacagaagacatgaaaaagatgggggtagagccgaactctgggagagaaaaaatatttgaagtcagggagatcgaatcagacatttcatttatcaggaactatttaacgaaggatcttgtgatgcgggaagacctctacttgtttcaaaaacagggaagggattataaaatcgtcgacaaggattgggaggctgtgcgcgatcagcttgtcagcatgagagtcaacggaggatttccttatttgacagttgaggacggagattacttaaagaacaatgaattatacatcaagcattggtatgaagggatcgaactcgatttgaagtatcttgaaaaagttctgccttacctccaccagctatggggaagaagcgtgcatgtcgagaccgtgctcgaagataaacccgtcatgttttcctatgatggaaaggctgtccaccgcagatatttataaaggctgcattttggcagccttttttcttttaaagcgcaacgatttcaactcgtccgtcctttcaaaagaaatgccaaattaatgcacgtttgcccagttttacgacttcattataaaaatgtaaaataaagtatttaatgatatttctaaaattgtaattttagctgccggaaagcgtaaaaatgtagtatttaagttacctttgaaatgtaaatgaaatattatctacccttaaaaactttttttgaaaacgaataattaaggaatttgacatagtaagtcaagactatacctgatggaattccctccttataatagaagcagaggaagggctgaagcagccgttctcaaaaaaatgaaactgctaattttcgcctttgaaaatataaaatattctgctattgggaggacaacatgaaaaaacaagtaataacagcagcatcagcggttgttttaggatcgactttgtttgcgggagccgcttccgcgcaaaccataacggtgaaaaaaggagacacgttatggggtttttcgaagaagtatggcacaactgtcagcaagattaaacaggaaaacaagctgaaatccgatatcatttacataggacagaggctgtcgatcaatggaagcagttcttcgtctgcaaaagcgtcgaaagtttcatcagctacgcataaagtggtcaaaggagacagcctttggaaaatttcgcggacatacggcatgactgttaacgaactgaaaactctgaacggtttaaaaacagatttaatccggattggacaagtattaaaagtcaaagggacgaaaagcgtaaaagcagcatcaacaaccaagccttccgcatcaagcgggacaagcaaaacaagcgcacctgcgcagaaatcttcaacgctgaatacgtcaaaacttgtttctgatgcaaaagcccttatcggaacgccttataaatggggcggaacatctacatcaggatttgactgcagcgggtttgtctggtacatcctcaacaaacagacaaatgtagcgagaacgaatacagtcggatactggaattcaatgaagagcgtatcaagcccggcagtaggcgatttcgtattcttcacgacatatcagccgggaccttcgcatatgggggtttacatcggaaacaatcaattcgttcatgccggttctgacggcgtaacgatcagcgatatgacaaacagctattggaagccccgctatcttggagcaaaacgcttctaatgttgcagggacaagcccgttcatcatgatgaacgggttttttccgtttagaaacggaactcggctaaaaacgccaaaaagtgctcgaccttctcattatctttcagactaatcgcatatccccctgcaacgggaagcttcatgaaatcgcacggcacctctattaatcttccttccatcagctcgcggcgcacagtcgacagcggcaaaaatgatataccgagtccttctgaaataaatcgtttcgtaatatgcgtctggcttacgagcatcgttctgacaaacggaaacttgatcctcagctgcctgacgaggtcgtcccagtattcagggtgattgtgggtcaacagcaaatattcttcaagcaaatcctcgacatcgagcggcggcgcttgttctgcagcgcggccgtcatgaggggcaaccaaaatcacgggatcgctgtacatggaatagcagttcaggtttgacgattgcacgtttaagcagcttagtccgatatctgcatggccagctgaaatcaggggagcgatttcagctgattcggcgatctttactttgatctccgaattcggatgcagcgctgtgtatttttttaatacaaatgggagaatcgtatcggcgataagcggcgaaaccgctaagttcaatgtctgtgagtagccttgtctgattctgtgaagctctgccatgctcgattcatagtcttccaacaggcgaagggcaaaaggaaggtaagcccgtccttctttcgttaaatgaatgcttcttcctttgcgggtgaacagctggcacccgagttcttcttcaagcagtttaatttggacggtgacggtcggctgagaaataaataaggtttccgccgtctttctgaaattttcgtattttgcggcagtgacaaaggtatgaagccatttaaaatccattgcagtcctcctgattaattttattaatcaaagacatcaatataattcaatattttttaaatattatatcaactataataatatttacaaaggaaaaaggaggaattgatatggtttatcatgggttaaaagggattacttgtgttgaaacagccatcagccgcattgacggtgaaaaaggaaagctgatctacagagggtacaatgctgatgaactggcgctttcgtccacatttgaagaagtcgcttacctgattctcaacggggcatttccgacggaagctgaactcagcagattcaatgagctgctcgcttcatttcgtgtgcttccagaagcatgcgagcgattgatccgcagtcttccggccgaattagacgatatggcggttctgcgcacggccgtctcttcattcggggacatatcgtttgcgttcaagccgacaatggagcaggccctcaggctgattgcggccgtcccgtcaattatcgcgttcagaaagaggctggctgatggagaagagcctgttcagccgctggatgagctaggttttgtggaaaattatttttacatgctgaaaggaaagcgtccgacagaagctcagaaaaaagcgcttgaaacgtacatgattcttgcgatggaacatggcatgaacgcttcaaccttttcggcaagggttacggtgtctacggaatccgatcttgtttctgccgtcacatctgcacttggcacgatgaaaggacctttgcacggcggagcgccgtctgcggtgacggatatgctggaaggcatcggggaaaaacagcacgctgaaagctatataagagaaaagcttgaaaaaggcgagagactgatgggatttggacaccgcgtctataaaacgcatgatccgagagcgaaggctttaagggtgaaagccgaggaaattgccgggggcgacagggatatcgaccttgctcttcatgttgaaaatacggcgatccgccttttggaagaatacaagccgggccgcaagctttatacgaatgtcgaattttacgcagccgctgtgatgaaggcgatcgattttgatgccgcattgttcacccctactttttcggcagcgagaatggtcggctggtgcgcccatgtgcttgagcaggctgacaacaacatgattttcaggccatcggctaaatatgtcggagaattggtctcacagtagtgcggacacacgccttctcatcgaagcgcgtgttttttaataggattttttgaatgtttagtagggaatcatgccggtgctcttgaatgtattcatcaagaaagtcctttaagggggagacgatgaaaaaaggattcctgatgttgatcatgctgttttttctaggtgcatgcacggaaggccgggattttgatgctgaatatgaagcgacaagcgcgaaagaaggcggaagcggcgccgaagtcatcgcagatcgcctggatgtgccttggacgatcgctcatactggcgagaccttttacattacggaaagaaacgggggaattgtgtccattgctgacggcaaaaaggagcgcatgcagcttcagctgaaaaagcccgttcatcaagaaggggagggcgggctgctcggatttgtactccatccggattttagaaacagtcaggaggcgtacgtttatcatacatacaaagacgggagccatctgaaaaaccggatcgtaaaattgacgcttgaccgcctcacttggacagaaacggatgaactgcttgccgatttgcctggaggcgcgattcataacggcggccggatggcgatcgggcccgatcaaaagctgtacatcacgacaggcgatgcaggggaaagggaatgggcccagcagcctgaaaagatggcgggtgtgattctaaggatggagcttgatggtacgataccggctgatcagccctttagctcgtcttatgtatacagtttcgggcaccggaatccgcaaggcctcgcatggatcggccgacagctttacagctccgaacacgggcagtctggacatgatgaagtaaataaaatagaacccggagccaattatggctggccggtgattgaagaaagcgatgagaagcagggaatgaaggcgccgctcatacattcgggagaaaaaacgcgggcgccatccggtttagcacagaaaggggacgtcctctatatggccgggctgcggggagagggtgttttccaggtcgatccggcggaagccaaagtagtcaagtggcttggcggatacggcagaatcagagatgtgaaagtgatcggcgatgatctgtatttcattacgaacaatggcgacggaagaggcgaaaaaaaacagacagacgatcggctcatccgcgtacctctgcctgacaagtaacctgtctcgcccgtttgcgtttaaggatgccggaatcgtggtaactgagcactaaacaatggtgaagaggtgagacaaatgaatccggcaaacagacagacagatggacagaaagcgcaaaaacaagaaaaacaacccggtgctgagcacaagatggtgccccttccgctctcggaagaccgcgactacaaaggaagcggcaaattaaaaggaaaaacagcgattattaccggaggagacagcggaatcggcagagcggccgccattgcatacgccaaagaaggtgccgacattgccgtcatgtacttggatgaacacaaggatgccgaggaaacgaaagagcgaatcgaacaggaaggagcagaatgcctcttgattcccggagatgtcggtgatgaggcgcattgcaaatcatctgtcgaaaaaacggtgaatcactttggcgggcttgacattctcgtgaacaatgctgcagaacagcatccgcaaaaagggatagaagatatttcgaccgaacagcttgaaagaacgtttagaacgaatattttctccatgttccatatgacaaaagccgcgctcccgcatttaggggaaggcagcgcgatcatcaataccgcatcgatcacggcgtatgaaggcagtccggtgctgattgactattcgagcacaaagggcgcgattgtcgcgtttacccgttcgatggctgcatcccttgtcaaaaaaggaatacgcgtcaacgctgtagcgccgggtcccatttggacgccgcttattccggctacttttccgccggaaaaaacggaaaaacacggcacagatacgccgatgggaaggcccggacagccttctgaacacgctgcagtgtatgttctgctcgcttcagacgactcctcttatatgacaggacagacgatccacatcaacggcggaagatatgtgacgacataatcccaaccggctgcttattgtaaggcagccggtttttttctgtttgttttttcggaaaaataagaatttgaaagaccactttcaaaaaagctgccccgtaagagataatagaaacagaaagagaaaggatgtgtatgaatgagcgaccgcagaatgacagcaaagtgggcatccaaacttggatttgttctcgccgccgcggggtccgccatcggtctgggagcgatttggaagtttccctatgtggcgggaacgagcgggggaggcgcatttttccttgtgtttgtcctatttacgatactgctgggataccccctgcttttgggggaatttgtattaggccgaaaaagccaatcggacgctatcggcacctatcaaaaaatagcgccagggacgccttgggtgatcacaggctggatcggaatcgccgcctgcttccttgtcctgtcgttttacagcgtgatcggcggctggattttgctttatatcattaaagcagtaaccggttcattgtcgggtctcacgcaggccggatacggggagctattcggttcgatcatccaagatccgctgcagacactggcagcgcagctagcgtttatcatcatgacgatcctcgtcgtggcgaaaggtgtgcaaaaaggaatcgagcgcgtcagttcgattatgatgccgctattatttattttatttattgcgctcgttttaagggctctgacgcttgagcatgcgatcgacggcgtgcgttttctgcttgtgcccgattttggcagcctgacgccgcaggcgattctttttgcgctcggacaagctttctttacactgacgcttggcgtatctgtgatggtgacgtacagctcctatttgtcaaagtcacaaaaccttccgaagtcggcgctgtcgatcgtgatcatgaaccttgccgtcacgctgcttgccggcttggcgatttttccggccgtcttttcattcggccttcagccggatcaggggccgactttattatttgcggttctgccggcagtttttgaccggcttccattcgggatgctgttttttatcggatttttgacggcctttttattcgccgccttgacttcggctttttcgatgatcgagatcattgttgcggccattacaaaaggcgaccaaacgaaaaggggaaaatggacgtggacgatcggccttttgatttttgccgtcggcattccttcctgcttgtcttacgggatgcttgatgagccgttcatttttaagaagacgttttttgatgcggcggattatgtcgtcagcaatattttgatgccgcttggcgcgctctttatctccatttttattccgctgaaattgtccaaacacgatctatatgaagagatgaaaagcggatcaaaagcggggaaaggcttttttatcgtgtggttttatcttcttcgtttccttgttccgcttgcgattgtacttgtttttttaaatttaatcggagtgttttcattttaaaagatcaggagatgggtgaatatggtgttagactttcaacagatgtttccgagcgaggatggcaatcacgaggcgcggtatcagctgctggcattgcttgaagcggtattggccggaatggacaggctgaaggatcccggccggctgacgcttggccgcgagtctgaagtttcatctgactactatcaaagcgtcattgaagaggccgtcttgccggaaaaaggcttcggggcggaaaaaagcgttgaagagctattgaaattgcttgacggccaccgctttttaaacaggcattatgtggccaacgcgacgcctctgccgaacaacgccagcatcgccgggaatcttttaatggttcttttaaacggaaacaatttatgggatgtcgacggcacggctgcagccaggacggaagtgcagatcacggcgatgctttctgatattgtcggctatgacaggcacaagagcggcggttttacaacctggggcgggcagggagccgtttttcagtcgctcaggctggcgatcgcaaacgcgtaccctgaagcgaatcagcaaggtacgccgcatcatctgtacgcgttctgttcagagctttcgcatttcagcctttataagtcgatggaagcttccggaatcgggacggaccatttgatcaaggtcaagacgaatcacgatcattcgatggatctggccgatttgcgggaaaaaatgcaagccgtgattgaaaaaggcggacatccgatttatgtattggcaacgcttggcacaaccgacgcatttggcatcgatgatttggccggaatcaagaacgtgactgaagaaatagaggccgcatacggtttgccgcctgtttatattcatgccgatacggcgatgggcgggatgtacagcttttttaacggatacgatttctccggcaatccgttgcatattgaagatgaggtgcttgagacgcttgcccgctacaaacaacattttcagcatttgcacctggcggacagcttggtctttgattttcataaactcggacaaacgccgtatatcacaagccttttcttggtgaaaaaccgcaaggcattgcaggctgttgatttggatccggatgagacgccttatgtcggcaacagagggtttggcagctatcatacgagctatacgctagagtgttcgcgaatgggaagcagcataccgatttatgcttctctgctcgcatttggaatcgaaggctaccaggagatcttggccaattacatcagggttaacctggcgtttcgaaaaaaactgctgcaggcttttccgaatgcagccgtcaccaatgatgtatcacctgtgacgacattccgcttctatccgggaaatgtccgctatcacgaagaaatcagcggcgccatcacggaggaagaagtgcggaatattaacaaatacaatgagaaaatcgccgaaacattgggaaggtaccgcagtcacacctatttcggcagcacgaaaaagcaaacatacgtttatcctgctgacagccgtttgccagtgccgctttatgtccagaaattctacagtgtctcgccttacacgacggttgatacaactgatcaatatatcacctttttaaaagcgcatgttgaaacgtcggatgtagcggctggataaaataaagaacaggaggtttgaacctcccgttctttatttagttcttacatgccgttcttttttgaaccggtatccatatttcgcttttaaacgttggggagctgatatcttgatcctgattccagaggatttccggccctttcgtttgctcataatgtgaagacgggaaccattcagcataaatgcgcccccagacattttgaagggtgtccggaaacgggccggccgcttcaaagacagcccatgtcgaggccggaacttcaagctgttcatattggtccggacattctttcgttgtcgctgtaccgatataatggtcaagttctccctgctcttccatcctgccttcggagaagttcgctgatgcttgaatcagtccaagcggttccacatttgaaagctcctttaattcatcgatgttttcactggttaaagttttccacatcgaggcgatatccggattgattccgtgaaagacgacagggactctttttttgattccgacgatccggaatgccttcttttctacaatacggtagttcatttcgtttcctcctctaattgttaactggaaggtcatcggaggatatgctttcagtgtgctgatatcgtgtctggcctctgtcggcgtaatgccgtgcagcttttgaaatgcgcgcgtaaaagcatccggcgagtgatagccgtatttcaccgcaatatcaatcacttttctttttgtgttcttcagttcaaacgctgcaagggtaagccgcctgcggcggatgtattcggacagcgaaaccccggcaagaaaagaaaacatccttttaaaatgatattcagagcagtaagaaagcttcgcaaccgtttgaaagtcgatactgtccgtcaggtgttcttcgatatacgccatggcttgattcatgttcttcagcaaatccatttgatgacctcctctgtttacaaatatagcaggagcagaatccccatatccgactttccgtgcccgattgtgcagggtcaatcttgagactgtccgccgttaaaccatgcagtcttcagctttttgatgccgtctgcgatgcttttttcagaaagtccgccaaacccgaggaggaccgcgtgtgtatcaggggggggcatatacgagactgaggctggatatactttaacccctttttccagcgctttttgggtcagccactcttcactcggggcgcttttcacctcaaggatgatgtgaagaccggcgttctctcctctgactgcggcatgatcgccaaattcacgcttgatggcatcaaggagcgtttttcgcttttttcggtagagtgttctcattcgattcaagtgcctttgataatccccgtttttcataaaaagagcaatggcatgctgtacatggcgggaaaccgtttgtttaaataaggatgccatgttaagcccttctttgacgagcggaaaggggagaaccatatagctgatcctgagggagggaatcagcgattttgaaaaagtccctaaatagatgacccggtcgttccggtcaagcccttgcagggaaggaatcggctgtcccgcatagcggaattccccgtcataatcgtcttcaatgatataagctccggtcgctgctgcccagtcaagcaactgcagcctgcggccgaccggcatgatcattccgagcggaaactggtgggacggagtggtgtatgcgagctgcggctgatattgttcaagatcctgcacggaaatcccgctttcgtcaaccggtattggaaccacattgaagccgccggttttcaggactgtttttgagcgatgaaatccgggattttcaaatccgacggttgtgcctttaggaaacagatggcacagcaactgcagcaaaaccggtgtgccggctccgatgatgatttgctcgggggaacagaccacgccgcgcgattctctgaggtaaaccgcaatcattttccgcagcggaatgtctccggccggggggccgctttgaaaaaggtcgtaccctgattcaccaacggttttggcgagcgtttttttccattgggaaacaggaaatgacgcgaggtctacatggccgtggtgaaaatcgatcatgtccgccgccgtctcatgttcttccagttctttttcggcaggaggaggaggcgcagtctgtgcaaagtcaccttccgcttcagccgcaaaccagccctttctaggcttgctgagcaaatatccttctgcagccagctgttcataagcgtgttcaacagttgtcaggctgacatttaaatgtttggcaagcattcgtttggagggaagctttgttccaggctttatatgtcccgaatgaatgccgcgtttgaaaaaagtgtacagctgctgataaagcggctcgctgccgctgcggtttaaaaagggggttatatccattcgatcatccctttcaattcatctggtatgttttattttatcaaaactggccattttaaaaaggtcagtttccgggttaaagtagtttcataatcaacagaagggaatgacgatgttgcttgattgtagggaattgcactctgaaacagagcttaaggaagtctatccaattatgagacagctccgcccccatttggatgaaacgtcttttgtggagctcgtcaaagaagcgcgggaggctgaaagctacacgttatttgcgctgtacgacggggatattccggtggctttggccggctttttgccgagggtctctttgaaccaaggccgtcatgtttgggtagcggatctcgtgacgtgtgaaaagcatcgttcaaaaggctttggaaagaagcttttaggcgctgttgaagagtgggccaaacggaacggattggcttcaatcgctttatcatcaggggtgcagcgcgctgacgctcaccgtttttacgaagataaaatggagtataaaaaagcgagctatctatttcgcaaggcgctgaaatgaaaaaatccccggtataaccgggggtttattaaaagccgagctgcagattcgtatcgatggagacgatggtccatacgcaaacgagaatgaaaatgttcaggacgacaccgagaaatccgagaccggtccgtccttttttgataaagagctcgataattccgagcggaacggcggccattgcaaaaggaagcatcttatacgaatatgcgatcgtgtcgcttaaaatggccaagtttaagacgaacagggacagaatggccgtcccgacagacacccatccaaatacgttgtgctccttaaagattcttaccagttccataattccacctcacctactttagctgctttgacaggcccttttttgatcagccgttcaacctcttttgacggtccggtaatgactgctccatacacgttcacaccgttcttttccacataggcaagccgtttggaaagcttcaggtctttcctgcctgaaatggtttcagcccatttattgtgcttgatcatataggaaagcgccgctttaaactgttcctcgccgttttcggcagggtgctgaatttcaaaaatccggtttgaatcttttccaggaaaaccgatcggctctgcgtatggatgatcttttaaatcgccctctgtctcgatcgcattccacagaacgcgaatgtcatagccttttaattgatcatacagctcctttgtcggatatgctctttcaaaggaaagaaaagcttcagttacggtgccgtcaggaagctgttttaaaatcgactcggctttggacactgatttttctttgatgccgtcagggtagacgaaatgccgttcttcatttgacagctcctggttgtattgatgaatctgcggagacttcagctgatcgaagaacatttccacgttttcatttccaactacttttgtgacgtttccgatttgcttctttaacgggaattgtgtttggattccaaagagttttactttgttgacaagtgcttcggtatcgacctgaatattcggttttgtgacggcaactgtcattgaagcggtttgcaccagttcatttcctttgctttcatgcccgcccaagccgtagtatagatagctgccgagtgtgcaaagcggcagaataataagcgttgaaattacggcaagtgtggaaatccgcatatatgatttattttttccgtatcttaaaatcgctttttgcttttcagggctgattgccaaatcccagtcttcgtctttcatttcctgttccagcatgtcctggtattcctcaagctgttcaagctcttcttcgacccggagcatttccgattcggaaagttcgccgtttttatatttttcccaacgttttttaaaatcttcattcatcgttaacacctctgttgtaaagtgctttcagccgctgtctggcacgaaataaaacacttttaaaattagcctctgagatattcatcaagcttgacgcttccttgtagttcaattcttttaaatagtacagcgtaagcgcttcccggtagttatcggggagctggttcatgtataaggttaacacttccttgatttcgacctggtgggcagggctttgcaccgcgttttgaaacaggcttccgatcatatcgtcagaaatcgtcacctcttttttatgctttctgacatagtcgataaacgcattgcgcgccacttgaaaaagccatggcttcaccttgctgtggtcgtaagaatggatgtgtatgtaagctctcataaaggtttcctgaagcaaatcctctgctagatgtttatctttcgtcatggagagcaggaacctgtaaacatcattcatatacatttggtaaatttcgtcgatagtcactgccttttctcccctctatgttataaacgcataagaaaggtttgaagttgcactaaatatgcccacggctcatttttcctccaatttcttacctttaaaaatcatctatcctatataataactgaacacgttcaaaaaaactaatcttcatgatgtaaagcggccgaaatataaaacacagcaacaaaataagcctttagcatatgaatctttattttatgctaaaaggcttatttttttgaggatatccttcatttaagaggtgcgggtaagctgttttgatcgtctgtcaaaagtaacggtcatgagcgcggtgtccttccgcggccagcgcatcggctttcgttcgatggacggtgccgaatggatggttgggcggagcatagatcgaataaagtttaagcggagtattgcctgtattggtgagattgtgccatgttccggcagggacgacgatagcggtgtcatcatatacatttcttctaaatggcaaatgatgtttgctcggccccatctgaacaattcccctgcctagttcaacacgaaggaactgatcgacgtgaggatgcatttccaatccgatgtcttcgcctgggttgaggctcatcagggtaacttgcaaatgccttcctgtccataaagcggtgcgaaacgttttgttctgctttgccgcttcattgatgttagaggcaaacggtttttgtccataatctcttaacacgatacgttcttcggtgccgggtgttcgaaaagcgcctgcataccctgatccgtgaaaccgtccggcgctgtaaggcgaaggaaggtgataaggaaattgatatggatgcatatgtttttaggtctcctcattagctttattaacatcaacgtatgcaataggcgtatggagcgtgcctagtctcaattttataggcttcatggtatcagatatacaaaaagaaggagagccatggaatacaccaacatatcggaacatcgctcgaaccgtcgcgcagcggtcatcggaacatgggccatcggaggctccaagggaggaagccgattcaaacgattcatgccgcgcttgatcaagagatcaacctggttaataccgctccggcatacggtttcggaacagatcgggccaaaattcacggctccgccgacaaaagaaaaagtcaggaaaccggggaggaaaattccccggtttttttgtgaaaaatcattttttagtaccaggtaataaaaaaaattgttataataataaagggaaacctcattcgactacatcaataaaggaagtgccatatgtatcaatttactggttatgctgcaaaagcgattctttctttgcgcggcggaattaaagtatacaataaagaaaatcttcctaaagacacaggtttcgttattgcctgcacacatgcaggatgggtggatgtcgtcgcactgggtgtcggcattttgcctatggaaattcattacatggcgaaaaaagagctttttgaaaataaattaagcggttcttttctttcaagcatcaacgcttttcccgtcgacagggaaaatcccgggccaagcagcatcaaaaccccgatcaagctgttgaaagaaggaaaaatcgtcggcattttcccaagcggaacgagatcatctgaagacgttccattgaaaagaggggctgtcacgatcgcccagatgggaaaagcgccgcttgtgccggctgcatacagcggcccttccaacggaaaagagcttttcaagagaggcaaaatgaaactgatcatcggcgaaccgctcaatcaggaagatttcgctcaatactcgtcaaaagaaaagctggtcaaaatgacggaggctttgaatgacagtattaaagctttggagaaaaagctggagcagctataattcaaacatacgcagggaaaaacagcttctcatgcacagagaggctgttttttttatttttctaaaattcaccttgcactccatttttatgataaaatagcagcgtttttattttttatgcagtatgttagaactatggttattggtggaggagctcatacatgaaatggtatttgaaagcaataaaaaactatgcaggatttacgggaagggcgaggcgaaaggaattttggctgttttgccttttctcatacatggttctggtcatctacggattttttaaagccattctgcatcttccggaatatgaaatagagacatttttaggaatggtttatttgctcgccaaccttgtgccgggcttggccgtcacgatccgcagattgcatgatacagggaaaagcggattctggatctttatcggtttaattcctctcattggaaagatcattttgctcattatgctttgtcaagacagtgaaaaaggggaaaatcaatacgggccgaacccgaagacagcgctctaagcgaaaaccgcctgaggacaggcggtttttttaattgccgggtgcagttgctttttctaaaaacaaaagcagttcctgccaaaatgtttgagctgcaatggcatcgtattcagtttttccgccataggctatttttctgctttttcttccggatgtcggaaagtatggaggcctgatattatgaccggctttttcaaaatacagatgtttaacagaataagagaatctgttctttttcagccgttcttcgattttctcgttcattgaggcagagggccatactaaatcgtcagtgcttgaagttaacagtataggacctttaataagttccgctttaatgattgcaggatgatcatctttcacttttcgtaaagccttttggtaaagatcaagaaaagcatgaggctgtcttgtgagcttatgtttcatcatattccacagctgaggaagcgaaaacatcggcagcggtgcaaaggcgagcggtgcgccgttcaggctccaggaagatgtctgccggaatttttttaatccaaccccttgaaagacgactccgccgcctacatgagaaacgacaaagcggatttcaggaaaatgagaacctattaacagcgccagttcgccgccttttgaccgtccgcatattccgatctgacgatgatgaagtccttcctggcgaccgagccaatcgatcgctttttgaaagtattcaagcggaatttcaaccagttttttaggcagctgtttgtattgaaaataagggattgcaagtgttgcgtatccgtaatttgctaacatgcctgccattgtttcgtcaaggccgccgtcagatccccctaatataatgattgcgggagggcggttaacggcaagcgggcgaaaaaaagtgccgcacaacccatcttcgtttacttccagtctatcaactgtttcagaaagcagcactcgttttatttctttactcaagatgatgcgttctttttgcttcacttcaatacggtaagcggacggatgaaccgattttttgtaaaatgagcaggaagattcaacagcctgcattgaccaaaaaagccccatttgatctttagactgataggttccttttagtggggctgctgatgcaggggcgacttctcctaatctattcgcttgaaaaacagcgtgtgatctccactctgcgtcagcttcatctttcactgtaacgatgatatcaatggtgtcaaacggttgaagtccgcttatcttcaagtttattttttcatcccatttggaaactgcaggtatgtgcaaaaccggttgcaaggtaatcaagacggcacttccttttcaagttttgtgtaaaataaatcgacgcactcttcaacatagtcatcaatccgatcattgaaagactccttgaatccgggcaaatgttgaaacataatatattgattcagtaaaccgaaaaacatttggcttaacatttgaaagttgccgtctgaaatttttttttcggcgtagagctttgcaaaataagcctctaaaaagcggttgagacggcggggaatatccatgattaattcgcaaacttctttatcagatacggcgtcattaaagtaaagtaaaaaaacagtccctttttccaggttttcttttaaatacgcttttgctatcaatgagaggtcttctcgtaaatcgccggtcagtattgctttaagttctccaataaaatctccggatgcaacatgttgaataacactttcccgaaataaattctgtttatttccgaagtgtctaaaaagggttaaatgattgactcctgccttttgggcaatttctctggtggatgcggctgtatatcctttttctttaaaaagggcaagcgccgcttggattaatcgatcccttgtagattgtgttgacataagtccctcctaaaatgtaaccgattgattacatcataattgaactttgccatgtaatcaagtggttacatattttaaatgcgaaaaaaagaggatacaattcattgtatcctccggtgtgttcacaatgttattccgcttcctcgagcagcgtttccgcagctttcttcacctctacgtatgaaacgtggtggccgtcgatttcgctgatcgtgaattcaaatccctgctcggtgatcatgtcgcctttttggacgtcatatttttgcgtcaggaaccatccgccgatcgtgtcaatctcctcattgtcgagctgaatgccgagcaaatcgttgacctggttgacgagcactttgccgtcgagaatgtagtggttttcgccgattttgcggatttcattaatttcatcaatatcgaattcgtcgcggatttcgccgacgatttcttcaatgatgtcttcgaccgtcacgagtccggccgttccgccgtattcatcagaaaggatcgccatatgaacgcgctctttctgcattttcagaagcagatcgtggatcggaacggtttcgatcacatgaatgatcggattgataaactgttcaatcgtgtcttctttggagcattctccgctgatgcaggccgtcagtatttccttgacattgatgacgccgacgatgttgtccttatcaccgtcttcgacgggatagcgggtatagccttcggccttcgtgatgtcaatcatctcggcgattttcatatcatttggaaaactgacgacttctgttctcgggatcatgatttccttggcaagacggtcatcgaattcaaaaattttgttgacatatttgaactcagattgattgatttcgccgcttttatagctttctgacagaataattcgcagctcttcctctgagtgcgccatttcattttcagaaaccgcttcaaggccaaacgctttcgtcaacagccttgctgatccgttcagcgcccagatgaatgggaacataatgcggtagaaccagatcaaaggttttgcaaaaagaaaggaaacggcttccgctttttggattgcaagcgtcttcggagcgagctcgccgacaaccacatgcaaaaacgtaatcaagctgaaggcgatcacgactgaaacgatgtgtgatacagagctcggaatgctccatttaacaaatagcggttcaagcagccgggcgaccgtcggctccccgagccatccgagaccgagagccgtcaaagtgatgccgagctggcaggccgataaatattcgtctaagtgcgtaatgacttttttcaccgaaatcgctgttttgtttccttcagcaatgagctgatcaacccgcgagcttctgattctgataatcgcaaactcagacgctacgaaaaatgctgttaaagcaattaatacagcaacaaaaatcaaattaactatttccaattaggaccttcactctagcgtgagaatgaaggtaacacctcctgtttagtaaaagattaactaaagcagcagcaaaaatgactggatgaccgtcattttttcaggagaaagacggcttttcagaatcttccgttcatcgggattcagccgtttcaatctgtttatgatcacggagatattgtcattgacatgatcgatttccgttgtcaggcttccaatttcatcatcattcacagttgaagagggaaactggttttccagcctttctttaatgtcggacagggccaatctctgctgcttgcagtccataataaacttcagccgtttgagagcggcttcatcgtaataacggtagtttgaacatgatctgtcaggcgttaacagcccgagattcgtataataatcgacagtccgttttgttacgcctgcagcagctgctaattcgccaatgcgatatttctctgccccatctgcatccctcctcaaccatcacgttatagttataaaacattttaatatattagaagctgtttatacaagttaattgatcaaaaaaaggcgtaaaattgatgcaaaaacctttatttatctaaatattcgagaaaatattgttagatttaaagtttagacatttgactgactcttttttaataaagtaagataatagtatatatttggcttggaggtggttggatggggccctctgcatagtcatttttacagaacgcacatcagccttattaagggaatttgaattcatcaggaggtgactccttgtcctttgtgaaggataaggttaaatggacgatattgttagtctgataatcatcgggattctgattgcattaaccgcttttttcgtggcatcggaatttgcgattgtcagagtcagaagctcccgcattgatcagctgattgctgaaggaaacaaaaaggcggttcgcgcaaaacaagtggtgtcggatttggatgaatacctttcagcttgccagctcggcattacgattacagcactcggactcggctggatgggggagcctacggttaaaaaggtgctgcatccggtctttgaaagcttgcatgtttctggagctgtatcgcacgctctttcagttgccattgcatttttagtgattacattcctgaacgtcgtggttggagaacttgccccaaaaaccatcgcgattcaaaaagccgaacagatgacactgtggctggctggacctctgcactttttcaatgttgtgatgttcccgttcatttggacgctgaatgcctcagccagagtgctgaccgggttattcggtttgaagcctgcttcggaaaaggatgaatcccattcggaggaagagctgcgaatcctgttatcagaaagctacaaaagcggagaaatcaatccgtctgaatatagatacgttaataaaatctttgaattcgacaatcggatcgccaaagaaattatggtgccgcgcactgaaatcgcctccgtcccggtggatatgccgatcgatgaggccatttcggtcatgctgcaggaaaagtatacgcgctggcctgtctataaaggcgataaggatcatgtcatcggcatgatcaatacgaaacagctgtttacggatatgctcatgatgtcagaggctgagaaaaagcgattgtcccttgaagcctatgtccgtccggttattgaagtcattgaaaccgtgcctgttcaaaagctgctgatcaaaatgcagcgggagcggattcacatggcgatcttaacggatgagtacggcgggacatctggtcttgtgacggccgaggatattcttgaagaaatcgtcggggaaatcagggacgaattcgatgaagacgaaaaaccgctcatcgaaaaagtttccgatcacgaatacatcatggacggcaaagtgagaatcgatcaggtcaatgagctgtttgaagacgatctcgaggaagaggaagtcgaaactgtcggcggacttgtgctgaaagaaaacatagatatcgcggaaggccaggcggtgcatatcggctcttacacgataacggttctcgaaatggaagggcgtctgattaagcacgtcgaagtcaagcgggaacaaacaacagaacatgtagagctggcaccggcaaatccggtcgtcgtaaacgaaatcaccttgagcgaaaaatagctcaaggtgattttttattttaagaaaaaagtcatttgaacaggaacattcgttcgtatataatgggaacaaacgttctgtgtgagaggtgattgatttgctgtggtacgagatcatttcggaggaagagagaaaaacgtatattaagcggatcgaatttcatttgaggaattggaaaaattacaaagccgccgtgctcaatttagaaaggagaatggagaaggagcaaaagaatgggctcgccgtcaaagaaagaaacgctgaatatcggatcgacgccgaaaaaaggctctatcaatttttgcttgattcgatggaaacggctgtctccgaattggatgaactcgagcggaagttggtggaatgccggtatattcataattggagcatgggaaaatgcgcgatggaaatcggctacagcgaaaaaacgctgtttttaatgaagaaatcgctgctggacaagctgcttgtcagcttggcggcgatcacgaatatttaacggatgcgagggcttgtctcaaacaagcccttcttttctggctgcttcagttttttttcaggttcttgacgcgatgatgacgcgggagagagcggtttttcttttatgataatgacaagctttaaacagcggggaggtttaacacatgtaatgaaacaaatgccggtcattttttgagacaaacgcttcaggaaaggagaggaagaacatggatttttctgaaattgcgctcgttccgctgattacgggattggtgcatacagtaaagcttgtcggcattcagaaacgatttctccccatctgtgcaattgtcttcggcatctcgatttctctgttgtttaccgcaggggactggaaggaagatatgatgatcggaacttggcttggcttgtcatcagttggattttactccggctcaaaaaacgtcttgaaaccattatcaaaggaggagattgaacatgaagatttatttggatccgggacacggcggaagtgatccgggagcatcgggaaacggtttgctggaaaaggacgtgacgcttgccattgctctcaaaatcaatgacattttattaaaagagtatgcaggcgcagagacgaggctgagcagaacgacagacaaaacggttacgcttcaggagcgcacagacgatgcgaattcgtggggggccgatttgtttgtctccattcatacaaacgcttttgacggcacggcgtacgggtatgaggattacatctacagcggcctgtccgatgaatcagttaccgctctttatcaacggatcattcacggcgaagtaatcaagcagaacggactcagggacaggggaatgaaaaaggcgaactttcatgttcttcgggaaacagcgatgcacgccgttttaacggagaacggctttatcgatcaccccgaagattcggcaaaaatgaaaagcgccgcctggatcgaacagactgcgcggggacatgcaaatggcatcgcgctctgcctcggcctgacgcagcgcgaattccccttgtataaagtgacgatggacggggggcaaatcggggcttaccaagaaaaagacgacgttttgaaagttatttctgcgaattgggacagctttcaaaaagcggctattgaaaaagggtagaaagggaagaatccattttgaatcattcaaaatggattcttgacatttaatgagtccgcatcttttttcatttgggcgtaatgttcctttctgaacgctcccatcagaatttgagctgctatacaaatcaataaaccagaataattggttcatcataacaccatcattttcacggaatcagcatgctgccggcccagaatccgccgattgagcctgccattgtaagcaggatgtaaaccgctgaagcctttacccgctttgcagccaaaagctgaacagcttcaacgctgaacgtcgaaaatgttgtgaagcctccgaaaaatccagttccgaccacgatagagaccgtttgattgtcaatgccgaggcttatgaatatgccgagagcgaatgagccgagaatattgatcaccatcacgctgaccggaatgcgggggcgcggaatcatcgccatgagcacattgcccagccaaaatctcaaaacggacccgattcctcccgcgatcataaaagcagctgccatcatgattgataccgctccttttctttccccgcagctccgctgacctttttgccgatcacgatccccaaaaatgcgaagcataccccgcaggcaagcgatgccatcaagtacagaactccgatgtgagcggccgattgcagcagaagtacggtttctttagaaaaagcggacattgtcgtatacccgccgcaaaaccccgtccctaagcataattggacgagcggcttttttgcccgagccgcaaaaaagcctgtcaaaaggccgagcagaaggcttccggacgcgttttcaataaaagtcggccaaggaaaaacggcggtgccgccgagcagattgactgcgtagcgcagcagcgatccgatggctcccccgataaaaacggcaacatatgatttcatactcttccttctttctcaaaaataatccgggtagtcggtaatgatcccatcgattttccagcttttgaggcggcttcccgttttctgcccgttgaccgtccaagccagcgccttcaaatcacagctgtgaatcgatttgatcagaaaagggctgatcatcgtagctttcaggctgacgtattgggcaaacgaagcgatttgccgcagccggccgcgcggcagcaatccaaatctcggcctgatcaaaacggcagtctgaatcgaaggatacatgtgatgaaacgccctcatggcgccggcgtcaaacgactggacaattgtgttcattgaacggccataccggctgatcagttgtccggccgctttttcgattccgggctgggttttggacgacttgatttcgatgagaaggcccgtcttattgtgatacttcctcagaacagcttcaagtgaagggattttttcgccttgatattcagggccgaaccagcttcctgcatccagctgttcgagctcattcatcgtatactcgcgaacgaaaccggtaccgttcgtcgttctgtcaaccttgtcatcgtggatgacggcaagttttccatcctttgtaatctgtatgtcgagttcgataaaatcagccccgagctccaccgctttttcaaaagcggcaaacgtattttctggggcgtaagccgaggctccgcgatgtgcgataatatgcaaacatgtcagctcctcttgataaaatctttccatcacaaggatacccgattttggcgatgcaagtaaatcctttgactaaagcggacaaaaggcagggggaagagatgtgcgacaaatttcggcaaaatggtacaaaagtatcatttactaaaaattctgatattttataatggacaaaaggaggcgagatgatgggtaaagggagaattaaagtggaagaacggattaagatcgaaaccgatgctgaaatgtttaaagcgactctccttgatcaaacacagtctcagaagaagaaatagcggtgttggcccgtatcacgttgtctctgggaacaataaaatagaatgatcatcaggctgccgaaggtgttcggcggccttttatgcgtggcatcggtatttttggcgtacaataaagtgagaaattttttgctcgttttagtataataaaagcttgatgagtgaaataagggagagaaagcaatgttcgaaaagtatatgacaatggatttcgctgccgatatcgggatcagcatcggtatccttcttttatttttcgcgtttagaaaaatatttacgaagtacttattcaacctgatactgaaattgacgaataagacgaaaacggactttttcaatcaggtggtgctggcgtttgaaaagccggccaggtggttttttgcgatactcggtatttatctggcgattatttattccccgttttttgaggggcatatggggatcgttcataaactgtacagagtgtccgtgattttggtcattgtaagcggcctgtataacttaacggcggcttcgtctgttttattcgataaaatcaataagcggcttgagcttgatatggatgatattcttgcgccgtttttgtccaagattctccgatttatcattgtagcgcttggaatcagcgtcatcgccggagagttcaattatgatgtcaacggatttgttgccggactcgggctcggcggattcgcttttgcccttgcggcaaaagacacagtcggaaactttttcggcggagttgtcattattatggagaagccttttacaatcggcgattggattgaaacgaaaattgtcacaggaactgttgaagatatatcgttcagaagcacgaaagtccgcacggccggagaggctctcgttaccgttcccaactctgtgctggccaacgaagcgatcatgaactggacgaaaatgcgaaagcgtcaggtcacctttacgctcgaaatcgatccgtcaaccccgcgggagaaagtcgagcggtgtggtgagcgttttaaagaaatgctcgaatcgcacgaaggggtcaacccggatgtcattatggtcaatttcgatgtcctgaaggatacgcatttaagcatcttcttcaactactatacaaatacgacggtctgggccgaaaacttggacgtcagacaggatgtgaactaccgcattcttgacattatgaaagaggagcaggttgattttgtttctccggggcacagcctctttgagttgaagaaaatgaaagatcagcaaggaaatgcttagaaacagtttttgaagggagacaagccaaatggaggaagaagccctgagatttgcggatatgatcgaaaatgccgagcgcattaccgttttgacaggcgccggtatgagcacggaatcaggcattcctgattttcgttcagccggcggcatatggacggaagatctgtcgagaatggaagcgatgagccgtgattattacgaacgatatccaaaattgttttggccgaagtttaaagagctttttcaaatgaaaatgacgggaacttatcggccgaatgacgggcacctttatttagccgaactcgagaaaagcggtaaggatgtcagggtgttcacgcagaatatcgacgggctgcatcttaaggcgggaagccgccatgtatatgaactgcacggttcgattcaaacagccgcatgcccaaaatgcggggcgcgctacggtcttgaccacattcttcaagaagaagtgccaaggtgcaatcgcgtcaatggcaaggggagagcatgcggatttatattaaaaacggatgtcgtgctgttcggcgacgccgttcagcatttcgacacgctttttgaagtcctcaacgaatccgacctgcttctggtgatcggcacttcactcgaagtggcgcctgtcaggtttgttcctgaagaagcgcacctgatccccggtttgaagaaagccatgatcaatctcgatgaaacgccttacgatcatttattcgacattgtcatcaatcaaaaaatcgccgagtttgttgggaaactcaatcattaaaaaggaagacgctccagaccggagcgtcttttttgatcttcatcacagttttttataataaaaaacggatgcatcgagccggccgtctgcagattccgcgtattcaggaatgcgtccggcttcggcaaagccgagcgaagcgtaaaggaggttggaggggtctttttcccttgtatccagcacgagaagagatctgccttcctgtttcgccctgtcgatcgctttttgcattaacgatttggcgacgccctgccgcctgaaggcgggatctgtcattcacttgcagatttccgctctgtggcggccgttttgttttgtgcataagtgcaattgaacacttcctgcgatccggccattttgtttggcaatccataaaaccgaatccggtgcgacggctgttttccagtaagcctccgccagccgcttttcgagcggaggcagaaagccgactgatgccccgtcatcgacgacgcggatgagaagctcggccaattgattggcatattccgcggttgaatgcaactcttcgattttcatttacccaccccatggtataaagataactgcatcataatcagaaaactgtttttttggcaacaagtgtgtcagataatcacactcgagggaggaaataaaaaaatccccttcatcaggggatcagacatgggatgttattcatgaacgggtgtcatggattcatcaagtgttgcaaatgaataccccatgttttttaaatttgtcagcaataacggcaatgattgaaccgttgaaggaatatcgtgcatcaggatcacgatcggctgttttgtctgccgcttttccaggatattcagctggttcatgacttccggaacgaatttttggcttctgtatttccagtccaggctgtcaatattccagtcccaataaataaatccgttctttttcagcacttttttctgcgcttcggtcagcgacggtttgcttccgtacggcgttctgatcaaatgggtttcaaccccggtgatagacttcagcgttttttgagcctgcttcatttccagattaggagaattggcgcctttataaaattgcttttggtcatgggtcaccccgtgaagtccaagtgcatggccctgctgcttcatattgagaacggcttctttgtgaagcttcatgttcggttcgagcatgaagaatgtcgctttagcatcatgttcggataaaatttgcagcagcctttggcttacggctgaaggcccatcgtcaaacgtcaaataaaccgttttttccttcgatttttctttctttttttccgcagcagctttttgcttctctttttcctgcttgcgcttttcgatctgctgttttgtgctcaagtgatcgagaagttcgccttgcgttgcttttttgagcggaacgctgtctccttcatgcctcatttggctgttttccgacaccgtaagctctcttttctcagtagcggcagaggactgtgaaaggtcccacacgtacaggagaatcagacacaacacgaaaaagcacgctgctttcgtcaacaaataagctacagatggggcagttttttttgatacttggcgcatgtcactctctccgtatcatttttctcgttccgattccattatgagatagaatgctagtctcataaaataatggatcacaatgtctaagtatacaggattggaaagaagatgaatacaggatgaagggaaaaatatatcaaattttaagagaaaatgttgaacgatagggaatgctgcttttttggtcctgaaggcggaaaaaagtttttggaaatattgcactattttgatcggcagggtcgtgttagaatggaatggagaaaattcagaagtcaacaaaaataaggggatggagaaatgaaagttctttttaacggccggctgattgaacggagcgagtgtgcggttgatattgaggacagaggctaccaatttggagacggcgtctatgaagtcatccgcatttacaatggaattttgttcacgcttgatgaacacattgcccgcttatataaaagcgcagccgaaatcggaatcgacctgtctttttcagaagccgagctgaaaagccagctgaaagagctcgtcgacatcaatcagatgcgggaaggcgggctgtatcttcaagtgacaaggggaaaagctccgaggaagcatcaatacggagcagggcttacgcctcaggtgacggcttatacatttcctattcagaagcctgaaaaagaacagcaaaacggcgtttcggctattactgcggacgacatgcgctggctgaggtgcgacattaaaagcttaaatctgttgtacaacgtcatgatcaagcaaaaagcgcatgaagcttcttcattcgaagcgatcttaattcgcgacggtttggtgacggaagggacgtcttcaaatgtttatgtcgtcaaacaaaacgctatctacacccatcctgcgacaacgctcatcttaaacggcatcacgcggatgaaagttcttcagctgtgtgaagagaacggcttgaattatgtagaaaaagcggtgacaaaggatgaattgctgaatgcggatgaagtattcatcacgtcaacgacagccgaagtcattccggtcacctcgattgacgggcaaacaatcggctccggagcgcccggaccgctcacaaaaaatgtgcagaccgctttgcaaaacagcattttgtcggaaacagccaaaacggtttaacaaagaaaaacgccgtctcctggggaaacggcgtttttttatttgcggaaaccgaacaaaatcgaaaagagcggcgataaataaaggaaaaacacaaacggcaaatattcaatgacgggaacgccgagcgctgtggacatgaacgcgccgctgactccccatgggatcatcggattaattaatgtccctccgtcttcaagtgatctcgacaaatgcttccggtcgattccaagcttgtcatacagctttttaaaggactgaccgggaatcaagatcgataaatactgttctcctgtcgccaggttcatgccgatgcttgatgaaacggttgagaacacaagccggcctttcgtatgaatgcccttgattacgccttcaagcaggcttgtaatcatgccgatcttttccatgagaccgccgagcgcgaatgcgatgatgatgagagaaacagagcccatcatcgattgaaggccgccgcgatttaaaatcttttcaacggcttcagtatcggctgagaaaaccgggccattctgcatcgctgacaaaaacgatgaaatgccggcgtcaggctgaatcagcgcggcaaaaattccggcggaaacgatccctgctgcaagcgacggaatgacgggcgtccgtctgacagcaagtacaatcacaagcagaggcgacagaagcgtgaagacgctgatgttgaccatgccttctattccgtttatgatcgcttgaatgttttcggttgaagccggtgccgccgttaaagaacggcccatgaaaaagaaaagcaaaatcgtgatcaaaagagcggggatcgtcgttcccgccatatgtctgatatgcttgaaaatcggaagctccccgactcctgcggcaaagttggtcgtgtctgacattggagacattttgtcgccgaagcaggcgccgcaaatcacggctcccgccgcccatgtcagtggaacgcctgccgccgcggccacaccgatgagggcgacgccgatcgtgctgaccgtcgtaaagctggagccgaccaatgaactgatcacaagacagctgaaaagtgcggtgagcagcaggtgctgcggttcaatcagattcaacgcgtaaaccgttaccgtcggaatcgcgccgctgtactcccagactccgattaagatgccgattaggcaaaggatgatgatcggctgaacgccatttcggatgcctgagacaatgccgctctcaagatctttccaagaatgccctttcaccgcgccgacagcggccaaaaaaccgacgcaaatcaaaagcggtatgtgcggttctgctttaaatatgaataagcaggtgaaaataataaacaatatggccataaacaatagagccgatatggaaaacgatagtcgtttttcgtttgacaaatcatacacctcattagaagaaatctctttctttaatacttttatgcttttgtgcgtaaacgtattatacagaaaaatagatcatatacttaaattaaaatatttcaaacatttttcaaaggttcgcccattctattttgaaagcgctgacttttttaagatataatagattggagaaaggcatgtatttgatacacgtttcaatatccttaagccaaaatagggggaaatgcgatgtcttgcactgttcagaaaagccggtttttacatgaggaagcgatacggtttgaaaatgatgatttagaggcagtacttgtgcccgggtggggaagcaatttgatttcattgaggtggaaggcgggcggtttgaatttgttgaaaacgcctgaaacaaaggaagaatatgacgcgaatccgtttttattcggaatccctgttctttttcctcccaaccggatcgatcacgggagatttacatatgcgggaagaacatacgagctgccgatcaatgaaaagccgctcgaaaaccacctgcacggatttctttacgataaaaagtggacggtaaaaaaaatggaggcaacagaagagcggatcatcgtgcagacgatgctggactctgatgatcatccgggcatcaaatcgatcttccctcactctttttccatcaccatcacctacacattagaaggacagcatctgaaaattgatgcgtcggctgtcaaccgcggtcaagatccgatgccgatcggattggggtatcacacatctttccgctatcctttaaacgaatcaggggataaagaaaagtgcctgtttactcttcctgcctcaaagcattggacgctgacagaccgcatgctgccgactggcgagtatcgggtgacagaggagttcaaagcgggaaaaatggcagcgggtgaaaggcttgatgatatattggcggttgagcaagaccaagaaggaaacagcaccgccgtcattgcggacagcctcgccggcattcgcgtacgctatcaatgcgacggccattttaagcactgggttgtgtttaacggtacatctgatcaggatgatctgctttgtattgagccatacacttggatgacgaatgcaccgaacgtgaaccttccgaagagtgtgaccggatttcgggatttggggccgcaggaagagctgacgatgcgaagcaaaattgaggtaggcggaatataatcgatattccgccttttaccatgagcttttatcaagcgtaaatcctgtatgggacgcttgtttgccctctctccaatccaattgaaccgtcacctcgcggccggcgatttcagcttcttcaagcccttccaaaaaagaaacggattgttcttttgaccctccgccggggagctcgcctcccgcaaatctttcatcggcgtctcgacttgggagttcaaaactatttcatcgccaaactttgttaccattgtttatagtcaagtaatcatatatactctcactattagacaagtatccgggagattattaagaaatctgttgattaaaatgagatggaaatattgtaaaaacttaacattgttggtttcttttatgttacaatacatatgaaaataagggggaaagaaggttttttaatgaagaacatttttgtaagtctattggtcctttgtctagtctctattagtgctttcatcggtattgaagatgcttttgctgcagaggaattacaagaagaggcttattctgaacctattaaaagcgcagacgatctacaatatgatgttaataaaaatttgactcaggaagaaataacatctagatttaacaagataaatacaaaatacgatgttggtcaggctttttctgagcaggatgctgagtttataaagttttatgcggattctcaactggaaactccttccgagttaaatgatgggatatcaattagtgcaattcaatggtatccaggtcaaacagccagcaaatctttcaatacttacaaaaagttctaatggagtgaaagttaaattctctgggaaagtctatggtacaattggtattgtaaatcatagttatagagggaaattgagtgcaaaaataacttctggaacatctaaagtaaagaaagcattgaaagtacgggtaactcactcggcttatgggttggtagggaaaaaatcaattggcattgtatataacagtggaaaatcttctacgggaacaaaatccaaagtttctatggataatactgttaaatatagtgctcttgcagttgtttatacctatacgaatgcttatgtatcagttactacaaaaacaggttctttcaacaagtatgctttctaatgatatgatagagaaggagagattgctttgatcaatttttcaataataaatgcggtcattgtattaggagtcttactattaattgtttggggaattgtctcctttattaacaggttaagaaaatcaaaaagatcataacataatgagaggccggacatttgaccggcctcttttaaaatcgttattttacaatcagcagcggaatctccgattttgtcgatatcttgtcgctgacgttgcctggttattacattgtttcaacgagctgacttcacccgtaacgggcatttttcatctgtggggagaaaaacatttgccgcagcttcctttagcaaaatgctttgttcagataacagcttcgctctctgccggacccacggagcttttccctgagctggtgttgatatacttggatgacgaatgcaccgaacctcaaccttccgaagaatgtgaccggatttcgggatttggggccgcaggaagagctgacgatgcgcagcaaaattgaggtgggcggaatataatcgatattccgccttttaccatgagcttttatcaagcgtaaatgctgtatgggacgcttgtttgccctctctccaatccaattgaaccgttaccttgcggccggcgaattcggctttttcaagctcttccaaaaaagaaacggattgttcttttgaccctccgccggggaattcgcctcccgcgtaatctttcatcggcgtctcgacttgggagttcaaaacgatttcatcgccaaactttacgaccaatttttccaaatatatatcgtccagctccccgcggtcgcctgtccagtagaggtctccaccgaacagcgtgcggccttctatctttttgatcacggcctcccaatttccgtcagcgctttgcccgttccatttcgggttttccgccatatagaaaccgatcagtctgccgccgaaataaacggcgcaaaaggccatgaagagggaggagatgaatagtaccggccgcttgtattcctgtttcatatgaaccaccgcctaaaaagttctgctttatgatcataaagcagaacaatcggaaaaaaaagccactctcttaaattttaagggaacgggtgcgggtgcaggttcaactgttctggtgttaacggctcttccgcaaagccgagctccttcggcacagtgaaaattctctcaagtccttccaggcggatgaagcgctgtccgaatgtcatcggaatcaggcccgggatgagcactttcacacagtaaagtccgttccgttcgataacaggtgaagtctggtcaacgacgatcacttcaaggttgagacttcggaaagcttcaagcaggtcgcagagatcttcggttaaatcaaggtgtttctttctttttttaaaggcatcgtcgaatgtttgcagaggcccgctttgattcagcaaaaaccggaggcgctcttcagcttcgggcagtccgtacatgaagctgtgatcctccatttcctgcactaaagcaggattgctgagcatctggtgatatttgctcctttcagattcaaatttgcggtcgtgcttcaacatcatgcctgccagctcatgaagggcgcttttcaccgcttttacgggatcggggtgggcgcctgcggaacaaatcagattcaatccttcccgttttctgtttttggcgatcgcccaaatgcttggaatgtcgtattccatcgttgaattaaagatatgcagatcatatcccgccacacttcgcaccctctctgtcatgaggcgcaattccggatctcctgaagagtcgagatccagctgccgaagtggaagcctggcgtaccaggcaagcaaaaatgaatcgcgctcagccgcttctaatatgccgtggaaaatcgcttcctccaaactccctccgagtgcacagccgttcgatgtttcatagacgaagctgtcttcgcggcccaggctgtaataggcgagcgattcaggaacgagaatcggccgattctgcaaaaatgaatagccccatacccagcggagcgggcgggccgggtgaaatggctggaaaggaaaatcgggatgcatgtattgttcggcttgatggagcccgacttttgccgggtcgagcgcacgatccttgacattttcgtaggtgtcatgtacgaccgtccgtttgccgcgcggttcaattccggaatagcgttccaaaccttctaaaatggcggtcaattcgctgtcttcatacgaatgactccgccctccgacaccttcatttcccgtccataaaggcatattgacgatcatatcggcgaacggcagaatcgcgtcataaattttggcgttgaatatccccgttctatgatccagatagtctttggcgagcgtttgttttaaatcgtccgtgtttcgcacgcgaaagctgtccgggttcgttttcaggctgggccgaagcgatatccgtgcggattccgctccgtcttcaggcagactgccgcatatagggcatgtcggttccgggatgaaagcgtggagcgaactttctaacgttttcaaattgacgatgtaaaggttttttttcaatcggccgcgcccgccgttcatgatgttgtcgacttctgtgcagaccaggctgaccatctggcggcagccggtcattgaaacccacgtatcacggcttataccattgcttttttgttccagttcaagcgtctctctgctgtcggggccggagatataccgtctcctatcggcgcattgggaacatcctgacgctgacggattaacgagcggcccgatgactccttcgccaaaagatgcaaacccgcgaagccacggaatccctgccgcccttagcaccttttcagcctcgcgatataataaaggccgccaagcatcgtgcagcacaagagcgaacgcagtctcctccggtatgctgttctcaaaatcagaccttcggatcacgttatattcagcagataattgttgtgatgcgccttctgccatcaatccttcgccaacgaccaaaatggagcggttcatcaaggttcctcctttcgcaactgcacgcagtaaatacctgctagtttttctttgaaaaatggttcagcaggcagctcatagacataaagcggcaagccgcggttgtttttcaaggcggaaagcagtgtttgctgcaaagcagcggaaatggggatggcaagcttcaggtcactaggctccagcagaacatccgcgcctttcacaggatctttgtctgtcagcgcccgttcgagcgcttttctgagagcaaatgtgatgttgagtccggaacttccgtaccagcggccgcgaattcccgcccatgcgacagggaagccttctatgttttttcctaaaccgatttccggtttgccgtacaagactgtcagcgcttttaaataaaatgaggaatgccggtcttccatcccgcccagctgaacgagggaaatcgtttcttttccgctctttatccgttctcgaaaccggtgttccaagcatttctccaatccccttaatacgccttcagccagcgtttctccggcggcgatcgcgaactccccgttattcggataagaacgcgtcaaccttgatgcatacatttcaatacccgtcagcccggcttcccgccgcgcctcttgatgggtcaaaccgaccgacaccgtctcaggcagaagctccgcaggtccggaagagagggggtctgctgtctgaacaaagcattgtgctaaaggaagctgccgcaattgtttttcttcccacagatgaaaaatgcccgttacaggtgaggtcagttcgctgaaacattggaataaccggctttctgcttctcttccggggcgctccgaaagtttcgcttcaaggtcgcagatgatttcaggcgaatccttgccgcaagcgaagtccggatgcggaagaaacatatgccagccgccttcgagcgttgccaaatcaatcaggtacacttgattcttcttagataatggtgcaagctcagcagctgctttcatcaattcgaacacaataacgtttgccagcatgtcttttcctgccgaaggaaaggttccaagcgttcgttcttcatggagcgcagaccgatggaggcgcctccaggcatcctccaggcatccgtctccttgttgatgaaagacagggcctgccagtccgacttgtttcaggcagatgccgggtatgaagcctttgttctcttcgaggcaaaacgtttgaagagcacggagctcatctgtgaagccgaggtcagagacatataaaacccaatcggcagatcgcaccgcttcccgccagtgttgcgtttcggcgcagccaatctccagtccgctttctgtttgccctgatatttctgccagttcgtctaaagcatgcccggatgcatccgtcacgatcgcacggattcttgaaaaaccggaatcgatcagcgaccggaccaattttgtgagaaaggagccggtccctatagccgatattttggtttgacgcgacagctgaaaacggtatgcgccggaatcggcaaagctttcaataaattcgatttgggcttcaaacgtttgaagcactgagctttccagtttgtgcgggagatcccggcttacgtcgcgaacaaacccgtttttataaagcatttctccgatttcatatactctctttcggtacggagcctgcagcccttttgtcaagtcttcaagcgaatgttccccgttgaacatcggcagaagtttttcgatccattgagcaatcgaagatccttttatgcgaaacgacccggagttatttctaaaatatgcgccgccgttcggatcaggaagaaaccatgtatcctggtttactttcaggcgagcggaagcagtcaggtgtgtcatgctcttcctccttccatgttttaaaaacaagacataccattatatgtaatttcgtttgtcctttatgcaatagaagacccctgcggcaaaagaggcaggggaagtcttcttttttataaaaaaactacatgcctccgtgccaacagctccaacagcaatgacccgcgcagctccaacaactgtggcccgcgcagctccaacagctgtggcccatgcagctccaacagcaatggcccgcgcagctccagcagctgtggcccgcgcagctccaacagctggcacagcttccgcagctccagcagcttgcgcagtgtttaacattggcgtgatgacggtccgcatcccaatgcgtcatatcttctgcctggaattgatccatctccaacgactgcagttcatcatggaatggttgcattttaatatcccccttcatcggtaaaattttttgaccaaaacacaataaaagaagaatgaaacataagcaaagtcagattaagtcaaataccccgggtactcacaagatcaaattatgaggtctgttaggtggttgttactaatttgaacgcctatttttcctgttattggattttgttggagggaggtttttattttgcggccatacttgcggcagtttattgatataaagatcgttggaggctgggagaggatgaaatcctaggctaagtagagatgtagcatcaaagaatgcaatctatgaaaataaggtattaataaaaatttgactctaaaaaaacggattcgattggtaatgaatttcaatgtagtgaaagtcgaattctcaagggaaagtcgtaaattaatgcaaaaataacttctggaaacaaacatctaaagtaaagaaagcatagagggtaaaggtagctattcggcttacggattagcaggaaaaaatcaattggcgttgtatatagcagtgaagcatcttctaaggacacagtgctcttgcagttttatgctgatgcgaatgcttatgtatcagttgctacaaaaactctttcaacaagtatgctttctaataatttgatagagattgccttggccaatttttcaataataaatgcggttattgtattaggagtcttactattaattgtttgggggattgtctcctttattagaaattcaagaggatcataacatgatgaaaggccggacaacagaccggcctcttttaaatcgttatttcacaatcagcacggggatctccgattttgtcgatatcttgtcgctgacgctgccgaacaggagctttttcaggcggttctggtcgcgcgtacctgtgatgacgaggtcagcgccgatgttttccgcatgctgcagaactgcgttggccgtgtctccttccagcacctcgatttccgcgtcgtactggttttcgctcaatatgattttcgctgccgcaatcgcttcttccgcgctgtcctcgtagatcatgggttcaccggccaagtctgaatcgcgggggatccggggtgcggccgggaagccgctgtaaaggtatggcgctccggcagctggtctttcggccgcagcctctgttctcacttgcctcggttcatggacatgggcgacggtcaattgtgagccgagccttttcgacaggtcgatcgcttttctcagcgcttttttgctttcctcttttccgtcaaacgcgactatgatccggtcagctttaaacaaattgatcattcctttcagaatggatttactgtcatattacccgttttcccaacaaatctaacgaaatataagaatatgaatcaaaagcctgccattcgccaaaaaaacaaattgacaattaaagggccgtactataagatggaaaatattaataagattggagggtatcgtcatgattagaaatatcaatgcatcagttcaacaacaaaagcacctaaacgtgacatttccataccttccttatgctcaggaatccgtttcactctaacaattttcagaaggaaggcgcatgtcgcgtgaacaagcgtacatgcgcctttttatattaaaaaaggcatgctggtacacagtgtgccttttttttcggagaaaaaacatcctgtttccgatgcggagcagcatgtttttccaataaatcaaccgcacataaggaggaattttttatgccgagtatcagaaaaaacgaaatcaaagattgtaaggaaaaacttgaaggcggctaaaaaaggagaggatatcgatgttttctgttttatggaagctgggctggttttttaaagcctcatggcggcgctacacgatagcggtcgtcctattgattattgtaaacgtattggaaatgtttccgccgaagctgcttggcaacgcgattgacgatatgcaggcgggcactttttccaaggccggcatgctcggctatatcggtttatttcttgcgcttggcgcagttgtttataccctgtcctattattggatgtatcagctgtttgggggagcgaacctggtcgaaaaaattctcagatccaagctgatgggccatttgctgaaaatgacgccgtctttttacgagaagaaccgcacaggggatttgatggcgagggcgacaaatgatttaaaagcaatttccatgacggcgggcttcggcattttgacactggtcgattcgacgatgtatatgctgacgatccttttaacgatgggttttttgatcagctggaaactgacgcttgcttcgatcattccgcttccgctgatggccgccgccatcagcatctacgggaaaaaaattcatgagcgtttcacggaagcgcaggatgcgtttggcgctttaaatgatcaagtgctcgagtccgtgtcaggggtaagggtgatccgggcctatgtacaggagaaaaatgatgtcagccggttcaacagcatgacggctgatgtgtacaagaaaaatatgaaagtcgctttgatcgattcgctgtttgaaccgacggtgaagcttttggtcgggatcagctatttaatcggtcttggctacggcgcctatcttgttttccgcagccagctgacattgggtgaactcgtctctttcaacgtgtacctcggcatgctgatctggccgatgtttgcgatcggagagctgatcaatgtcatgcagaggggaaatgcttcgcttgacagggtaaatgaaacattggcatatgagcctgatgtgagagagcccgctgaacccgaagcagcggagccgggcgatattgtgtttgacggggtcacttttacgtatccgagctctgcgtcggaaaacctggccgatatttcatttaccgtattagaaggacagacggtcggaatcgtcggaaagacggggagcggcaaaacgacattagtcaagcagctgctgaggcagtatccgcaaggaaaaggaacgatcaccatttcgggcgtgcccattgaacgtctgccgcttgatcagctccgcagctggatcgggtatgtgccacaggaccacgtgctgttttcaaaatcagtgaaagacaatattttgttcggcggacacctcgctgaagaacgcgatttgcacgccgtcatctctgcagcacatctgaaaaaggatattgagatgctttcagacggcttggagacaatggtcggagagaagggagtcgctttatccggggggcagaaacagcggatttcaattgcgagagcgatgattgcggagccccatattttaattttggatgattcgctgtccgctgtcgacgcgaaaacggaagcggcgattattgaaaacatccgcagcagacggaaaggcaaaacgacgtttattacatcacaccggatgtcggctgtcgaacacgccgatttcattctcgtcatggaggatggaaggatcgttgagagagggacgcatcaagaactgatcggccggaaaggctggtattttgaacaatatgaagcacagcagcttccttcgggagaagaagggggcactgtagcatgacaacaggaaaaaggcttttccaatatgcgcttctttataaaaaaattctcatctgggcgctcgtcatgctgacgaccgccgtcacagccgagctgactgggccgatgatcgccaaaaagatgatcgacgatcatattctcggaattgaaaaaacgtggtatgaaacgacagagaactcgaaatatactgtttcctacaaaggaaaggaatatatcagggaagacaggacagacccttcagctgaaaagctgcaggaagttcacatctttcaagtcggtatgaactactactttgtggggaaaccggtttcctttgacggggagcggacggtttccgggggagagctgagaatgacgagcggagaccggacggaaacctacaaggccgatcgcctgtctttgtctgaagtgtatgctttttacgagcctgaaataggagggctgatctcgctcgtttctatttatttcggccttctcattttctcgatctttttccattacggccaattctacctcttgcagatgagcgcaaaccgcatcattcaaaagatgagacaggatgtattcgccaacattcaaaggcttcctatccgctattttgataatttgccggcaggaaaaatcgttgcaagggtgacgaatgataccgaagcgatccgcgatctgtatgtgaccgttctttcgacgtttgttacaaatatcatttatatggccggaatattcgccgcactgtttttccttgatgtcaggctggccggcgtctgtctgttgattgtgcccctgattgtcatttgggcggctgtttatcgaaaattcgcttcaggctacaatcataaacttaggtcaatcaacagcgagatcaacgccaaaatgaatgaatcgattcaaggcatgacgattattcaggcattccggcgcggacaggacacaaaagaagaatttgaacagctgaatgacagccactttcattaccaaaataaaatgctgaaattaaactcgcttatgtcccacaacttggtcaacattctgagaaatgtgatgttcaccgctctaatatggtatttcgggggagctgccctgaacgcggaaggaatgatttcaatcggcgtactctatgcattcgtcgattacttgaatcgtttatttcagccgattacgggcatcgtcaaccagtttgccaagcttgaattggcgcgcgtatcatcggagcgggttttccgcctgctggatgagccgggcgtcgatgtcaaagagccgagcagcgaaagagcgcgggggcgagtcgtgtttgaggatgtatcatttcgctatcatgacggtgaagatgtgctgaaaaacatctcatttgaagcgaagcaaggggagaccgttgcattggtcgggcatacgggctcaggcaaaagctcaatcatgaatgttcttttccgcttttacgatattgaaaagggcgatgtcaaaatcgacggcagaagcatatatgatatgtcaaggcaggaaatcagaaagcatatgggcatcgttctccaggatccttacttattttccggcacgattgcttcaaatgtcagccttgacaatgctgatattactagagagcaaatagaagacgccttgaaacaggtcggggctcttgaggtgctcgcccgtctgccgaaaggccttgacgagccggtcatcgaaaaaggaagcaccctttcttcaggagaaaggcagctgatctcgtttgcccgtgcgctggcatacgatccggctattcttattttagacgaggcgacggcccatatcgataccgaaacagaagcggtcattcaaaaagcgcttgacgtcgtcaaacaagggcgcacaacctttatcatcgcccacaggctgtcaacgatcaaaaacgccgaccagattctggtgcttgaaaaaggccggattatcgaaaggggaaatcatgaagagctgatgaagcaaaaaggccaatactatcaaatgtatgaattgcaaaaggggaaaggaaccctgatagggtaagccggatcttcacccggccttaataagcgagccccaccctcgccttgacaaactggtcagactctagctgtgtaaaaagaaaatgggcggtgtcgccggtggatatttctcttccgccgggcggcagaacatcctgttcaaaacggtatgtcttcaatgccggcccatcggggagatacgtcgggcagacgatcgtccaatccagatcagattcgcggagccgttcgtacacacgggcatgttcttgagctgcgcgcgtagagcgccgttttgattcgtttgtttcaaagcggtaaagggccgggttctgccttgcgtttaaaatgccggcggttccgatggtaatcagccgtttgatccgatgtacgttcatggcgtttatgatgtgttcgatggagacggtcaatgtatcgtctccatctgtgtttaaacagctgacaacgatatcgcaatcttttattaaagactcgacgtcatgccggttcctggcgtttcctatatgtgcttggcataaatccggaatgctggcgccttccgtcctccggacaagtgcgttaacggaatggtgcccatcctcttcaacaaaattgagaaaggcctgtccgacacggcctgtacctccaaaaagcgcaatcttcaacatgatcactcccatcggatctatcatacgtcagatcgtccggaagaaaaagccccgcgtaaacaaaaggttccatgataaggacggacatttgagacatactcattcaatagagaaatcccgacaaattgaatcaattcccaattgatgctcaacatcagctgcatgccgacccctcctttataccagcatatgaaaaaaggagaagcgggtgcgggctttcacaagatatgccagaggggaggcccccgtgatggtaatgaatgagaaggtttgccgaaaagctaaagaaggtgcagtatatgcaccttctgttatccatgaatatgaagttgtttaaaattgttgaccgcccatagatgcttgagcttgggaaactaaacgttttgtaatttctccgccgacagaaccgtttgcacgggaagtcgtgtcagcgccaaggtttacgccgaactcagaagcgatttcgaatttcatttgttcgatcgcttgcgctgctcctgggacaagcagttgatttgaagaattttgattagccatttgtcatcaaactcctttataaaaatggtatggttgtgctgactggagttgcaccagctgacggcttccaccgatagaaaaccgctgccttctcggctaaagcccaatgttggtttgtactacgtattatggtggattcaataaaataaatgcgcgtttcaatctggtaaatgttgaaagacgaaaaggttatgattggggcaagctaaggaaaaaagccaggaggatgaagaagatgatgtgtccagtgtgcaacgggattctcgtccagacgaggcattgtccgaagtgcggcggggaaatggcggacgccgggagagcaaccgattttttcggtccttacagtccgtacatggagttcgattcatttaaacaaacgcaaaccgcgtgcgttcatttatatacgtgccaagactgcacttatgaagaaaccgttgaaattgaaacgaccgaagcatagctgcatagagagccgcagcatgcttcggtcatgtttgaaactgtgttatccttcagagcggatgcggagctccgtttctttatcaaaaaagtgagctttattcatgtcaagcgccagtggaatcgtatcgccggcctgaacgtcggtccttgaatcgactctggcgataaacggctgagtgccggcctgcgaataaagcatcgtttccgcgcccatcagctcggctacctcaattttcgcatcgactttcgagtcttttgacgcttcaatgaaaacaggttcatcatggatatcttcaggcctgattcccatgatgatttccttgccgacataaccctggccgcgcagaactttcatttttccttccggcacgcgaaccgaaacgccgtcgaatgtaaacatgtcttctttcagagtgccggtaaagaagttcattgcaggagacccgataaagccgccgacaaacacgttttccggattttcgtagacttccttcggcgccccgacctgctggatgattccgtctttcatgacgacgagccgcgtagccatcgtcatcgcttccgtctggtcgtgggtgacatagatggtcgtcgtctgcagacgctgatgaagctttgtgatttccgcgcgcatttgtacgcgcaatttggcatcaaggtttgatagcggctcatccatcaagaacacctttgcatcccgaacaattgcccggcctaaggcgacgcgctggcgctgtccgccggaaagcgcttttggctttctatccaaatattgttcaaggcccagaattttggccgcttcatggacacgccgtttgatttcatccttcggaaacttccgcagcttcaagccgaaagccatattgtcatagacgttcatgtgcggatacagggcatagttttggaataccatcgcaatgtcgcggtctttaggagcgacatcattcatccgtttgccgtcgattgtgaattcgccatccgtaatttcctcaaggcctgcgatcattctgagcgttgtcgacttgccgcagcctgacggtccgacaaagacgataaattccttatcctcgatatgaagattaaaattatccacagccgtaactttgttgtcatacactttgtatatccgatcgagcacgagttccgccattttttctccccctcttttatgtaagcgctttaactgatttaagtttataaaaaacggcagggcggtgtaaatggacatggtgcacaatttcttttcgtgcatattgctgaagccgctaaaggagatgcatcatcaaataaacagcggctgcttcttcaaactgtctgatgtcaattgcagtccgttcgataaatttatcaattctgtactgcaggctgtttcggtggataaacaaacgtttggctgtaagagaggcattcaggttgcatctcatatacgttttgatggtcagggatgtctcgggatcagacagcgcttctcttacggcgtccgaaaatgaagaagcatgaacccgctccggttttgccgtcaaaaaagacgggaggcactggcaaaacgtggcgacgtttccgatgtcacccgcttccagcatgtaatgaaacatttgtttttcaaagcggattttgccttgaagcgatccgttgactggatgaagctggccgctgaaaaacacaggagttgccatgaaatcgcttgtcagtgcatccgcaagctcggacagctctttttttgcgagaaacggtgaaggattttcgtggacgataacggcttcatgccggtcgtaccatacaacaagcgggtctttaaaaaagccgctgaccgcttctttaatcgcctgtctttcttcaggggcatgctccattttaaaaaaatggccttgaatcagctgaatgtttcccgggttttggaggggggcatcgcaaaagaaatattcgtgccattctttctcccgctttgtcagctgctgcggacgatgcggttctgaaaaaggccggaataggcaatagagcagctctttttcccggtcggtgaccgcgcttttcaaaacgccgaaagtttcgccttcgtcggtttgaaaccataatgcatcgtgttttgaaacagcatcagatccaaccatccgttcaccgtaaagcgtctttaatttctccagcatacgtcaacgtccttttctttactcgtaaatatggaagagcattaattcatgaatttcgcttttcagggaaggctcgtcatcatgcgggggataggtgctgccccactcgatttcccccgatttatgataaattccttcataatgaatccctttatgataaaacgatattttccagccgggaagcctttcttttttaaacagcggcttccattgaaagtgagaaatcattaacgccacgctccttcattgatttcaggtgggcaaaatccagcgagcagactaaacgttgatttgttatcattgtatctcattcacagaaaagatcatagattcttttcaaatggagattttacaaaaaaataccgtgaagaagcagattcttcacggcttgaggtcatgccacatgtcctccggattaaggattgactgttcggttaaataagaagcatattcaaagcttcttttcttcgttaagcggctgacagatgccagacggggatgggagaagattcctcggccgggccgggagttggcttcaaacagccacacctttcccgaacggtccaatcccaggtcaaagccgatttctccgatgaaaccgtcaagcttttcgtcaaggacccggctgagaaggaccgccgcttttgtcagcttttgcagagtgtgaagcctttcctgaggatcatcataaatctctgcaagtgttttcacggcgccgccgctcgacatatgggttgtaattccgtcctttccagcgattttggccgcgatggctgtgacggtccattgaccttttccgtttttgtttgtatgaaccctgaaatctgccgggtgatgatccacttcgatccgttcgatgccttgctgggcaagataagaagtatgtttgtgaagcatctgccattcttttaaacattcagcagcggacgaaaaagatgtgacgccttcggcatgtctggcaagaataccgttttcttcccgttttgaaagctgaaatatgcctttgccgaaactgccgccggcgggctttacataaatgaagccgtattggtcgatcatgtcttcgattttatcggcatcgggctccaatgccgaaaatggaagcaattccgctgtcctctcgtcttgctccagacattcatagatctcccatttattaaagaagcccggattgaaccacggaatgcggtattcatccataagccgtttttttgtttcccgcaaggcggaggattcttcggctttgcggttcggcagtctgtcgtatacaacattaggcagcgggactatggcctcctcccagccgttttccctgaaaatgagagcctgcaccgtgccttcttcccaattaatctggtgcgccccgaacagatagctgtagcctcctgccgggagatccatcgtcaaaagcttcgaaaaaaataaagaccttcctctgacaggatcaagctgcgattttgtgaaaccggccgtgaaaatcccgattaaaggtccgatatagacggtattgtcgcgaaaaagcagggaggctttgccgcggtacggaatccgcaggtttttgtacagattttcggataataaaacggtgcgcttcaaatggctgtcaaatgagacgtggcaccgttcaacactcgtaccgaaagcggcgaataacagaccgtcctgtttgaaagaagcgggcaggagcatcgtgttttcactcgtctggtggatgccgaccgtcagcggttgaccggtcatcttttctcagcccctttcgcgccggctgaagccgttaagaatgagcagtactccaaaggacctttatacaaaagctcccttttttcaggagagtgcttgataaaagcgtgttttccgggctttgagttgacatccagcagccagacttttccgtcttttgtcaggcagatatcaaggccgagctcgaataatggcccgtgatttgattcaagcgccaggggaacggcctgcgccattgtctctaaatcatcgagaaggacggcctggcgctttttcggcacggataaaagccagctgtcaaagctcaccgcctcagagccaccggccaggtttgcaagcagtccgtgctgatagctccgccttaccgttttaccggctgtttcccattcgccatagctgtttttttgaagcagcagtctgatatcacacggaaaaccgtctttgtcttgaatatcgaggaacgattgcagcagatagcggtgctgaagaactttctggcaccacgtttcaaatgaggcctgtttcgaaaatgacttcagctgtttgtgttttccagtttggtaggcggccttcaccgtttttcccgtaagctcgaagtgaatgatgccgcggcctcctgatccggatgcaggcttcaagatgcacgatttttcttttgcaagcttgcgcaggatatcctgggcattttctgcaatcgttgttgcaggaaggtaggacttgatgacgggatcggctttcaatgttttgtaaaccgtccatttgtcaggaagtccaagtcctaaaaatgtcgttttaggatactttttgagccattcgacaatcggttttgcttttttcgattgctgatccctgccgtaaaagcagcggtcataaatcaattccgggatttctcgttcaatttcattccactgtcctgacttcgggtgaaaggagagtcctttcacaagcagggaaccgggggaaatatccaggggtgtgaaccggataaaccggattccgtagtccgaagccactttggccagttcttcggcataggctttttcatgttcgtgcgacaacgacataaatccaagcgtcatcatgattatacctccttcatgaaaaacaaggcttaacaggctgagactgtcaaacttcgggcaaactttaatatatagacttctgtttcatgatacgcttgagattgcagaaataggcttttgtaaattggaaatgattaaaaattttagagcgcccttcatacaattgccatctgacccattgtattttgaagcggcttgctccattccgttatttgcccgtcttttattcagctactataataacgttaggcaagacgatataggatcgatcgtcaaggcccacgctgtgcagctatgatgtcaggtaaaaaggaaggcagttgaaaaaaacatgtatgtatttgggatttttgccgttatgattgcagtcggtgcacttatcggcgctgtaacgaatcatgttgcgattaaaatgctttttcgcccatatgaagcgatctacatatttggaaagcgggttccatttacacccggattaattccgaaaaggcgcgatgaattggcgaggcagatgggacagatggtcacaggccatctgctgactacagaagggatcaaaaaaaggcttgcatccgatgcggtaaaaagccaggcggtgcaggtcggagagcggctcctggcgcacctctcgcaatcaacggccaccgttgaagaagcattggaaagcatcggaatttcaaatcccgctcaaaaagcggatcgagcggtatccagatgggcggatgagaaactgtccgcatttttagaggcgtatgaaaatgaaccgctgaaagagcttatccctcttgaagcccaggaaaagctgaaagagaaaattccaatggtgtccggctatattttaaaccgggctgtcagctactttgaaagtgatgaaggaaagaaacgcctcggacatatgattgacgattttttgaaagaacggggcatgctcggcagcatggtgcagatgtttttaggtaacagcagtctggttgaccgcgttcagccggagattgtgaagtttttaaagaacggcgagaccgcgcggttcttaacagatctgcttgaaaacgaatgggacaagatgaaagaatatacgttcaaggaagcggatgacaaatggaacctcaagcctctcattttcgatttgaaggaaaagtttttgaaacgattctcgcttcagccgtttttcgaaaagacgataggctccactatttctagttttgagcgggatatcgctttgcgccttccgcagatggccgaccgccttctggaagaagcgggccgccgccttgatcaagcgctcaaacagctggaactcgagcaaatcgtcaaggaacaggtggacaacttccccgttgaacgtcttgaagaaatggtgctgtccatttccaagcgggagttcaaaatgatcacgtatttaggcggcctgcttggcggaatcatcggagcggtgcaagccatctttgtgattttgatctaaggctgaagacggcctgttcaaacggaattatcgtataactgtgaaaaacactccatagtttgttatagtggagtggtgccgattccataagaagaatacgggcaggaaaggagcggatcaatatgacggtcaatttacatgactcggcttatgacttggaacaagccttgcgtcaaagcgatgaatattcccgattgaaaaatctttatgatgaggtgaatggcgatccatctgctaaaaagatgtttgataactttcgcgatattcaattgaaccttcagcaaaaacagatgaacggcgaagacatcactcaggaagaggtcgaacaagcgcaaaaatccgtggcgctcgtccagcagcatgagaaaatctcgcagctgatggaagcagaacagcggatgagcatgctgattgctgatttaaacaaaatcattatgaagcctttggaagagctttacggaaatccggagagctgataaaaaatcccctcttgtcttgacaagaggggattttttcactaagtgaacaaataatgttcataaagatttaaaaaagacttgtcaatttgtgaaatagttgcgataatactaaatgtaagtgctttcatttttgccgggatacgatcatgaaaaacggactggcggcaaaatgataaggggtacagaggaatttgacagattgaaagcaccgtctgctggtcaaataaaggggttgtcaatatacggtgaattgaacgaaaggggcgttgaattcactgttttgaatatgagggagaatcatgatcgtatccacaagatgcgaagtcaaaagtctgtgaaaacaggctttttttagtatgtacatcaagagggctgttctaaaaaaagggaccgggacatatcctctataacagattcagtcatcaaagaagggggacctcctggtgtcaaaacaaatgcttgcgctgaatatagacggaacgctgcttcggacaaacggacggcttcatcccgcaacgaaggaagcgatcgaatatgcaaagaagaaaggtgtatatgttacgcttgtgacgaacagacatttccgctccgctcaaaaaatcgccaaatctttaaagctggatgcgaagctgattacgcacagcggagcgattatagcggacaaaatcgccgaacctttattagaaaaaaggatttccgaagaacagacatttaaccttgttcaaatactggaaagctatgattgcaatatcagaatcctccatgaaaaatattcgattggaaatcggaaaaaaacgaattcaaacctgctggggaaaacgatgattcacccgtctgacccgattttttatcccgtccagtttgtcgattcgctgagcgacatgctgatggatgaaccggtcagcgcgccggtgatcgaggtttattgctcaacaggtcagtccgaagaaatcaggcagacgatcacaaatgcgtttcctctcgtcgacatcattgaagcgggagaaaaaatgctgattgtccataaagggatttcgaaagaagcgggcttgacgatgctcgccgccgacctcggtttaaaaatggaagatgtcgttgcgatcggccatgatatcgacgatcttccgatgatcgagcttgccgggctcggagtcgcaatgggcaatgctcctcaggaggtcaagcaaaaagcggattgggtgacgcgctccaatgatgaacagggcgtcgcttatatgattaaagaatacttcagaatgcagcaaagcaaagggtttcttaaaaaattccatattaaaaaagtctgattcttataggggccccgcttcaacttgaatgcggggatttttcattcatcgctgccttaaaggaatgtttgtttcccggattgattttgcccatttatttttgtacactaaagaaagttttgaaacgaaaaaggtgatgacattgcgcatttatatagaagggctccaagacgaaaggttccagagaccgcttgagcatatagcgaacttattctttgaggaaagcgaagtcgctcttggcgaagaagcgccggcagaccttgcgatcgttctcggctatgaacgggaagaaaacggcgtcaaggcttccggtgcgataaaggatacggacattacagcagaatatgcgaaaaacattgaccccaagctgacggaaaaggaagcgtttaagcaggtgaagaataccgtttcctacgtttttttgagcatgcttcaggagcataccgggatcattcagaaatgggggattctcaccggtgtccgtccgacaaagctgcttcacaaaaagctggagagcggcatgccaaaggaagaggcccatgccgagctgaagcgggattatttaattcacgacgaaaagatcgaactgatgcaaaacattattgaccgtcagctgaaagctgtacctgatttgtatgagctgggccaagaggtcagcatttacatcggcatcccgttctgcccgacgaagtgcgcctactgcacgttcccggcgtatgcgatcagaggacaagccggacgggtcggctcatttttgtgggggcttcactatgaaatgcaaaaaatcggcgaatggctcaaggagaacgatgtcagcatcacgaccgtgtatttcggcggcggaacgccgacaagcattaccgccgaagaaatggatttattgtatgaagaaatgcaccgttcatttcccgatgtgaaaaacatccgcgaggtcacagttgaggctggacggcccgatacgattacagaagaaaagctcgcggtcttaaaaaaatggaacatcgaccgcatcagcattaacccgcagtcttacgaaaatgaaacgctgaaagcgatcggacgccaccataccgtggaagaaacgatcgaaaagtaccatctgtcgcgaaatgccggcatgtcgaacatcaatatggatttgatcatcggccttccgggcgaaggagtaaaagaattcagacactctctttccgaaaccgaaaaattaatgcctgaatcattgaccgttcatacgctgtcatttaagcgcgcgtctgaaatgacgaagaacaggcataagtataaggtggctgaccgcgaggaaattgtcgcgatgatggatgacgctgtctcgtggacgaaacagcacggttaccatccctactatttgtacaggcagaaaaacattctcggcaacctggagaatataggctattcccttcccggccaggaaagcatctataacatcatgatcatggaggaaaaacagacgattatcgggatcggctgcggagctgcgagcaaattcgtcgatccgggaacgggaaagatcacacatttctctaacccgaaagacccgaaaacgtacaatgacagatttgaacactatacagaagaaaagcttcgctacctgtccgggctttttgacaagaatgctaaaggcagttaaaaggttcggtttaaaacgggacagtccctgggcaaaacgaaaggagacttcgccaatatcctggcgaagtctccttttctgtcatcctctttgttttgtttcggattttttccacttaaatattttgttcagtatatgaaaaatccgttttgattcttttgtcaaaagcggccccaaaattgccaggatcagtacgtacaaagcggcaaacggctttaatgtggccgaaagtccgccggcgattccgaggttggcgacaatgatcgaaaactcgccgcgtgagacaatcgttaagccgatattggatgaagctttatgagaaagtccggcccttctgcctgcgatcatgccggcgataaagttcccggccaaggtgaggatgacggcgccgattgaaagccataccgcatctcccagtgtaaacgggtcgatgctcaatccgaagctgaagaaaaacattgcaccgaagaaatcgcgaaacggtacaaccaaatgctcgatctggcttgcatgttctgtctcggaaaacacgagtccgagaagcagggcgccgattgcttcggcaacgtgaatcgtttccgaaaagccggcgacaaagaacagcagcgcaaaaatcacgataataaagacttcgtttgaacggatatcaaacagccgatttaacaattttggcagcttcctggcaacgataaagaacaatatcatgtagccaaaagcgatcaaaatcgaaagcagcgccgatccgactgaagttgagtcaccaaggacgagccccgagacgacggataaataaacggcgagaaaaatatcttcgaacataatgattccgagaatcagttcggtttccggattcgctgtcctctttaggtcgacaagtactttggcgacaatcgcactcgaagaaatcgtaataaccccggcgatgatcagtacttcgagaaactcgaagcccgcgatgaacccgaacatgaggcctaaactgaagttgatcagaatataaatgcttcctccgacggcgatggaccgtcctgatttaataagctttccgatcgaaaattccagtccgagataaaagagtaaaaacaagacgcccattctgccgaaaaaggcgatgatctccgagctctcgataaacttcaagttgatgataccgatcgtcggagcgtgcgggcctacgatcatcccgagaacaattaaaaagggaatgatcgagaatttaatccgattcgcaattaaggcagcaattgcgacaagcaagagtgcagtgccgacttcaaatactagatgatccaaagagcatcacccttcctttcgggaaagaaaagcctgcttcatttccttgaggttttttctttcaccggacaggacgagtgtatcattttcatcaagaacggaatctgccccgggattcaagaatttttcctgattctttttaatgatcgcgatgacagtgacgccgtagttttgcctgacgtcgatttcaccgagagttttgccgacggcatttgctcctttttcgattttgaaccactcgatgatcaggtcgttaaacgccatttcaatcgattcaagcgcctgcggcttatagaccattccgccgaggatggcggcgatctgccttgcttcgctgtcatcaagcgagatgttggtcacgatttcatcgggatcttcgtcgtcaaaccgatagatttctcttcttccgtcgtcatgaacgacaatcgtcattttttcatggtttctcatttctatttcaaattttttgccgatacccggcagatcactttctttaatattcaatcatatccctccaaaataaatttccccattcggctgaaaagttatgcaggtgaaaaagggaaaatcaggagaggtaattagattggtatttcacaggaatagcgcaagttttttttagaattaattcatttgattgaacctcgaatcgaggaatgaaatgagtgtagaaacgtgcgtcaaagacagaaatatttgcggctcttcctggatgattaagaaagctttttgtaaaaggggaggggttcactgcatgtgtctcaaactttgaggtgtttagagacatatggtattccgcttcgggatcaaaaacagggttttgctcctgatcggcgaatggtactgttaacatgcataaactaagcatcaacgtcaaaaatgatttaattacgcccatccccctttcctcacatgctttctataaataactatatctaaacaaagaaaatcattcaactaaaaaggcttatttcagtatcaattgatcttgaaatggaaaatcattcagctgattttcacatgaaaaaaggtattgaaaataaaaggtggaattaattaagctaatatcttacaaaatcgtattcacggaggtgcaagatggaatatatcaaatggaaagacgaagacgggatttttgaaattgtactgaatcgctctgaggcgtacaatgccttgaatgaaaaaatgcttgaagaactgaatgaagctttgcgtgttgcagaggaaagcgaatcgctgcttctccttgtgagaggcagcggcaaaggattttcggcaggcggagacattaagatgatgctgtcttccggagatcaagacagctccgcccgcgtcattgacacaatttctgaaattgcggtgaagctttacagcatgccgaagatgacgacagcggctgtccacggtgcggctgcgggtctgggattgagcctcgcgctcagctgcgaccatgtactggtcgaaaaagaggcgaagctggcgatgaattttatcggcatcgggcttgttcccgacggaggcggacacttctttttagagcggagaatcggtgaaactgcggccaaagaattgatttggagcgggaaaaaattgacgggggccgaagcgctcgagcttcggatcgcagacgccgtattcagcggggactccggccgttttgcgcgcatctttcttgaaaagcttctgcacgctccgctggcagcgatgattgagacaaaaaagatctatcaggcgttgaatggaggcaggctgcagaaaacgcttgaactcgagaaaacggcccagatgaaaatgaggctgacaagcgaccatcaggaagggatccgcgcatttttagaaaagcgccagccgcaatttaaccgtcagcaagtataacaagagcggtccggcaggaaattgaccttgggaaatgatgtgcagaaacaattgtaaaaaaatttaagtttctataaaatgattcataagacacaggtctgttgcgctcaggcaagtcgaaaaatcaaaaggggagatgcgttgtatgaaagctaaactgttgttcgccatggtgccgctggctgttgtgttaccgtcttcaagctttttggcagataaggggaaagccccttccttgtacgcggacaaaatgatcacgactgacaaggaggctcgagtttaagggcatgatttcatctgagaatgagcgggctgacgcagcgaaagaatgggcgatgtatattgcagtttcttgccttttcatcctgatcgtctctgtgatttgttttttcgctccggcctaccgcttgcaggatctcttgtttcgaatgtttgatgctgtcatcatctgtgtgctgacggtcaatggcctttattatctgaaaaaaaataaaggcgtcgcttgcgcatcgtttttactcggcttcatcaacatgggactgctcgttgttttgatggtccgctagtgtttggcggataaagggcaggcggcggcagcgtgaaacttttcccccgaagcgccgccttacccgtattttagtcagctgcggaaaacaatgattttaccggacgaatgtactacccggtgtgtatgctccaaaaattgcttttccttcagcattcctcttcctttctctttcgcttcttcatcatcagccgcttcaaatcgctcattcaaaagcgtttttccactagtatcgaaaacggttacataataattttccatttctcttcccctttctcaaaatataatctatttgtttaaaattatataaaaatacaaaaaaatcctttttaaaatggtatgactaacgtatgattgtaaattggaaggaggagttattatgctcaaaatcgatcacgtcacgaaaagattcggttcatttacagctgtaaacgatctgacgctggagattccagacaagcaaatgttcggtctgctcggcgccaacggagcagggaaaacgacgacattccgaatgatattaggccttttgaatgcgacagagggtactgtcacatggaaaggacagccgattaactacggtgtcacaaacagcatcggctatttgcccgaagagcgcggactgtatccgaagctgaaggtgaaagatcagctcgtatacctcggccgcctgaaaggcatgacaaagcaaaatgcgctcaaggaaatggagaagtggctcgaacggttccatattacggaatacgccgacaaaaaggttgaggagctgtccaaagggaaccagcaaaaaattcaattcatcacggccgtgctgcacaagccggagcttttgattctcgacgagccgttcagcggtctcgatccggtgaatgtcgagcttttaaaagacgcggttatttctttgaaagacgacggcacttcgattgtattttcaagccacagaatggagcatgtcgaagagctgtgcgaacacgtctgcattttgcagcgcgggacgcctgtcgttcaagggaaattaaaagaaatcaaacgttctttcggcagaaaaaatgtcacgattcacgcggacggcgacttgagcttcttgaaagaggcggacggcatcgtcaaatggcgtgatcattccgaaggagtccgcctgcaggtcgagaatgaagaagtctctcaagagctgtttacaatgctgcaaggacgcgggtttatcagaaagtttgaacttgaagagccttctttgcatgatattttcgtcgaaaaggtaggtgcccgttatgaataagttttggattgttctttttcatacatatatcagcaagctgaaaacgaagtcgttcatcatttcaacggccatcacgcttgcgcttgtcgtgctcgtcacaaatttgggatcgattatttccatgtttgacgacggcggagagggtgacaagatcgctgtcattgatcgctcaaatcagctgtacgacacgtttgcccagcaggtgaaagcactcgatactgatgaagcgctggaggtccaaaaagcggataagccggaaaaagagcttgaaaaagacgtcagagacgaaaagctcgagggcattttaatcctggagagagataaaaaaggggtgctgaaaggaacgtataaagcgctcgatatcgctgattccacagctgtctccacgattgaacaggcgctctcgcaagcaaagatcgccgttggaacggctgaattgaacgtacctcaggaaaagctgagtgaactgtttacaccggtaaaagtcaacagtgttgccttgaaagaaggcgcgaaaaccgaggaagagcttcaaaaggcgacagggcttgtgtatgttgtgctgtttgtcatctatttttccgttttgatgtacgcttcaatgattgcgacagaagtagcgacggagaagtcttcccgcgtaatggaaattttaatttctagcgtgccgcctgtccagcaaatgttcgccaaactgttcggcgttgccctattaggcctgacacagcttgccgcgctccttcttgccggctatctgtcgcttcagtccagccaggaaagcggaggggatgcggctgagctggttaaaggattttttgatgtttccggcgtacctactgcaacgcttgtgtacgcggtcattttcttgatgctcggctacttcttatacgcaactcttgcggcatttctcggaagcgtcgtcagccggattgaagatgttcagcagatgatttcgccgatgatcctgttggtcgttgccggattcatgattgccatgttcggactgaatgctccggattcgacgtttattaccatcacttcattcattccgttttttgcgccgatgatcatgttcctcagagtcggcgtgcttgatattccgttttgggaagcggctctcggcatcggcatcaccgctctcacgattgtgattctcgccgtcatcggggcgagggtgtataaaggcggcgtgctcatgtacacaagcggcggcggattgaaaaatatcaaacaggcgcttcgtctgtcaaaagatcgataatgaaaaagaaaagcagcttgaaagataagctgcttttttcatgcaaatagtagaacgtgcattcgctttcaacccgtggtagaatgggagcagaatgttttatgaaaaggagcagaagattgacaaacatcactttcattcatgcggcagatctgcatctggacagtccgtttcacggcatcagccagcttcccgaggagatttatcagcggatcaaaaacagcacatttaaaagcgctgaaaatgtgtttaagcttgccattgatgaacaggccgacttcattttgcttgccggggacctgttcgacgaagcaaaccgcagtttaaaagcacagatgtttttgagaaaacaatttttaaagcttaaagagaacaacatccaagtctatgtgatttttggcaatcacgatcatctgggcggcgattggacgccgattgaatggccggacaacgtccacatcttttcagcggaagacattgaagaaaaatcgttttacaaagacggccggctcgccgcaagcatctacggctacagctatcccgagcgctcagtttatgccaataaggccgctgaaatcaaaaaaacgaccgacgcgcccttgcatatcggcatgattcatggaacgctttccggagagagcggccatgacccgtactgtcctttctcccttcaagatttaaaaaacggacagatggattattgggcgcttggacatatacataaaagacaggtcatttcagccgccgatccggcggtgatttatccgggaaacacacaatcccgccatatgaaggaaacgggggagaaaggctgctatctcgtcaatgtttgcggcggagaactgtccttcgaatttaaagccgtatcggatgtcctgtgggaaacggccagcatcgatatctccgggacaaagcagatgacagagctgatcagcctcatgcacgatgcctttcaatctttcagaaaaagaggcaagcccgcatgcgtcaagatggtatggacaggagaaacaccctcttatttggcggaaggacaggccggcatcgcggacgagatccttgacatcttccatgaagaagaacgggaggaagacgcgttcatctggcttaccgcgatcgaagatcaaaccgatgccgccttgtcgggaatcgaaagggacgcttttttccaggagcttttgcaagaaatccatgagtttcaagatttcagcctgattcttgacgatttggagcggcatccggtctttagaagacacggagagctgtttaatgaggaagacttccgggacattcgcacgcaggctgaaaaactgctgcttcatgaactgaagacattgaaaagataaggggggatgcagggtgaatatacatgcgatacatatatacggatacggtaaattcgccaatcagacattccgcctgtctccttcaaatctgcatttgatctacggactcaatgaagccgggaaaacgacgctcatgtcgtttattgaaagcgtgctgttcggttttccgaagacgaaacggtacgagccgaaaacgggcgtcatttacggggggatgcttgaggtcggacaccctgatttcggccaaatccgaatcgaacggacggccggaaagcccgagcgggtcaccgtttacttggaagacggcagcacgaagccggaaggttttttaaatgagctgctgtcaggcatcgacaggcagctgtataaagcgatctactcatttgacgtgttcggccttcaggaaatccataaattcaaccgcgacaaaatcggccgttttctgctgttttcaagtctgttcggctctgatgcgatttccaagctggatgccggcctcgtgaaaaagcaggaagagctgtttaaaccgaacggaaggaagccggagctgaaccaggagcttgatcggttaaaaaggctttctgaagatttgaaaaaggcgaaagcgcgggaaggcggctattaccgtctcttaaacgaaaaaaaaggcgctgaggcgtcgataaaggaaagcggacaactgctcaaagatcttgagcatctcgtcttacaaatcgagcaggccattgagattctgccggcggccgcggaaatgcgccagctaaaagagcagctcgcatccctcggcggctcagaagaaagccgtttccccgagggcggacttttcgagctcgaaaagctcgaatcccacctgcatccaaaagcggctcagctgaaggcgctggaagaaaaaaagcgcggtttggaacagcgcgccgccgcttttgcaccggctgaagacttcctcgagcacgaagccgaagcggaagagcttttaacggcgtatccgttttaccagtcgtataccgaaaaaatcgcgtctttgactgaacagcttcaccagataaacggacgggttcaagcggggcttgaccgcctgcaaatcgaggaatacgatatcctcaatgcggacaccacgtatgaatacgagtggaagttgcaggaaaccgttcaggcatacatagagctgcgcgaactgaagcggtcgctcgacgagcggtttgagcaggcgagggctgatctggaggaagcggaacaggcccatgccgctctcagcaatgaagtgatgcccgatgatgtccgaaaacaaaaggaagaaacccttggccgccttgcgtccgccggcggtcatgccggaaggcgggaagagctgatccttcagctgtcctatctgaagcaagaacaaaaagttcggatgaaaagaagaaggaccgcttttgcgggagcgctttgcgctgcttttgcggcagcttttgcggcgctctttttcaaggagtggttcccgggcgctttgctcgcgccgatcttgctgatatttgccgcttttattttaaaaaagcctgagccttccgcggcggcggcttttattcaaaaacagctggatgatattgaccacagcggttcaaaaggcggagtaagcgacagcgctttaagggaggagctgtggaaggacgaccaaacccggcagctccttatcgccaaacaagctgagctcagacagaaagaagcggaatatgaaagagcgattcaaaaattcgaagagtgggaaaaggatatccgtccgtatcaggagaagaccgagcgctatttaaaagagctgaatctttcaattgacccgtcatttttagctgatgcgtacgctttgattaaggaactcagagaggaaattttgaaaaagcgggatatcgagaaggaactgagccgccttcatgctaaaaaagcatcctttgaagcgggattgagaaagcttgtcacatccctcagccttgcgggcggaagcgtccaagagcaggtgtttcagctgaaaagcgagcttgagtcccaaaaagagaaacttcgtcaaaaacaggaagcagacgtgtctttaaagcatgcggccgaacaaatcaaagagctggcgaaagaggtggaatacttccaatctcaaattgccgaactctttcaaaaggcaggggcggacgggcgtgagatgttcgtcggactggcgaagcgcgatcaagccagaaaagaactaacggctaggctcgggcagctcaaaagagagctcggcagacaggacgagaaggccgttatgctcgcctcaggccactctctggcagaactgaaaggaaagctggccgagactcaggaaaaaagagcgcgcatagaaaagcagctgacagaagaaaggcagacggcggctaatttccatgcagagctcgccagacttgaggaatcaggagcggtatcggagcttgcctatcagaccgggatgcaaaaagagcgggtcgccgaattggccaaaaagtgggcagccgtcaagctgatccggcaggcggtccaaaacaagatagatgaacataagaaggttcggcttccgaagctgttacagacggctgaaacattactgaacccattgactgccggacaatacgaaaaaatttatttttctgaaacagatgattccatgatggtcatgcggaaagacggagctcttttttgcgcacacgaactgtctcaggcgacttgtgaacagctctatttagcgatccgattcgctctggccctctcccatcaaaagaatgtcaaattgccgttccagctggatgacagctttgtccacttcgaccaagagaggtttaaacaagtgctgaacattttaaaaaagctttcaggcgaagatcagcaaatcttgtattttacgtgtcatgaacatgtaagagaagctttccgcgatgaagatgtgattctgctgccttccggaatgaaaaaggtggaaggaaaggagatgactaacaaataaaagtgtgtgctataatgattttatgtaggaaaacggagggagctttatcatggcaaaaggtatcatgctgcacgaagttggcgagcaggtggatttgtacttgctcattaaatcgtcaacgaaaggaatcgcaagcaacgggaaaccgtttttaacgctgatgctgcaggatcagtccggagatatagaagcaaagctgtgggacgccaagcagcaggacgaagtgacctacggcccgcagacgatcgtgaaagtggtcggcgacattcatcattaccgtgggcggaaccagctgaagctgagaaacatcagacctgcaggcgagaacgaaaacgtcaaaatcgatgactttcttgaaactgcaccgattcccaaaaacgaaatgatggatgcggtcactcaatatatttttgaaatgaaaaacccgaatatacagcgaatcacaaggcatcttgtcaaaaaatacggcaaggaattcattgattatccggctgcgacgaaaaatcaccacgagttcgtgtcaggtctcgcgtaccatgttgtttccatgctgaacctggccaaatcggtcgcagacctgtatccgtcgctcgatcgcgaccttttatacgcaggcgtcattctgcatgaccttggaaaagtaaaagaactatccggcccggtgtccacgacatatactgtcgaagggaacctgctggggcacatatcgattatggtgacagaaattgcaaaagccgccgaagagcttcaaattgattcagaagaagtgctgattcttcagcatttgattttaagccatcacggcaaacccgaatggggcagtccgaagccgccgatggtcaaggaagcggaaattcttcactatatcgacaaccttgacgcgaagatcaatatgatggacagagcgctcgaacgggttaagccgggagaatataccgaacgggtcttcgcattggataaccgttccttttacaagcctgtttttcacaaataagcgtcataacttgtctcccttttgcataatgtctggtatacagtttattcaaaaaagggggaaaagccgtgctgctgtttccgtggtgggtgtacctttgcatcgtcggcattattttcagcgcctataagctgatgacgacggcaaaggaagaggaaaagattgaccaggcttttatcgaaaaagaaggccgcatttatatcgaacggatggaaaaagaaaaagcaaagcgcatgaagcgtacactggatgaagatcaagaacagcatgaaaaatcggctgacagccattccatcgcataaaaaaagctgtccgaccccaacgaggggaggacagcttttttggcgtcagctgctgctgcttgtctgagcttgacgctggtcgacttgttttttcaactctttgtcttttacttttaaatcagcatctttgacaagtttgtcaatgacggattgcagttcagtttgatcattttgcttttgttcttggacttcttttttaagctcttttttcatgtcttcatatttgccgcgttcttcgtcttttttaatgatgtgatagccgaattgggatttcacaggtccgctgatttcgccggttttcaaagcaaatgccgctttgacgaaatccttgtccatgttatcgtctttgccgacccagccgaggtcgccgcctttttcggctgtaccgtcagttgaatactcttttgcaaggtcttcgaatttttcgccttttttcagctttttctcaacttcttcagccgttttcttttctttcacaagaatgtggcttaagtggattttgcctttcaggccgtcataatattcttttacgtcatcatcggttacttttatgttatcctttgcggctttttgcatcagaagttcgtatttgatctgttctttgacgaagtcttcgcctttttggtcaatgagctggttgagctggtcacccattgattttttgtactcgttcagctttttgtcgatttctttgtcggagacatcgtatttatcatcgagtactttttgctgaacaagcatgttcagtgcgtccgctccggcattgtcttttaatgtttgataaaggtcttcttttgtaatatttccagcttttgtttccgcaacaacctcagaatctcccccgctgcatgcgctgagagccagcacgcttgtcgctgtaatcgccgcaattgcaatcttcttcataaatgcaaacactcctaatcataacagtttaaactttcctttgaattgtatcatatcatattctgacatgctgtaaaaagattttcaacagaggggcatccgtctagtcaaattttctttccgctcatacaaatatattgatcaagaaaaggaggtcaataacatgagcggaggatactcaagcggttttgctttattggtcgtgttgttcattttattaatcatcgttggtgcagcttatctgtactaaaaccttagaaaatgagaaaagaaccgtcattttttcaggcggttcttttcttttggacgatagcctaatcgtttcatgacattcgtgcatacactaatgtaacgactggggcagaggaggtgtcaatatgggcgacggttatgcaggaggtttcgctggcggctttgcgctgcttgtggtgctgttcatcttattaattattattggtgcttcttggatatgctaataaacaaaaggatagctgccggatcaatacgatcggcagctatcctttttctttacaccgtaaaggaaatctcaatgaatgatgagatcaataaaattaagatcagcacattaatcattctaaataccttatcctgccgctcttcaggaatctctctgacaaggcataaagagtttgtaagcttgtttatgttgaagacagtaaaaaccgcaaacaagatgaaataaaaaaggatgataggagatccccctctctgtttctgctccatactacattaccaaatatttattaaaaaagatagaaaatagactgaaaaaaaggaatttccaactgcctagcagctggattatttttgtattaaaatatcaaaatcgtcggcttcctgatcgacaaagcagtttttaggcgctttgatcagtttccaggcaaacagaaaatcaggcagacaatagccgaaatgaatgcttgagatgatgcagaaatagtgagcaaagctcggcatcgccgcccccgcgtaaaacaaaacaggcgtgatgaccaaaaaagggcagagaagagagacaagcatcatgtttttcggaatttctctccatgttctcattttcaaccaataaatctttttttctaactttttcttgctgatcatcggcaagatatgaagaattttatgggcgattatagccgcaaccaaaagtcctgcaaacaaaagggcatgatcgcctctctgaacagtttgcggatgaataagctgcatcgctaaatattcgggaataaaaaataaaatcattaaactgacggcagtgagcacgatgcgcatgcctccataatctttaacgagattgatggttttccagcaactcataaatgacatccttccgtttcaacaaactgttatatgaaatcctcagaataatttactcctctggatgagaaaaatcaatccctttttcgaaaaaaatttcgtcattttccaaagaatttagaagggtgtaaaaggatcagaaatctccagtgttgaactttcatcagaagggaatatcggctaaaataagagaaagggagagaagagacaaatatgaactcaatggagcaacgcctcgagcggctggaatattacatcaaactgttattgaacaatgcggatatggaagagtatccgtactataaaatattgatcgaaaagggcttatcagaggaagaagcaaaggaaacggaaaagctgtgcgaagagctctcaaaggagcttgaagcacaaaaagcgcaaggatttgtgatgttcgatcatctcctcacgctttttgccggacagttaaatgaaaaacttgaagtgcacgaaacgattttcgcccttcacagacaaggtctttacaaaccgctgatgagcgaattcatcagcattatcaggcagtacgatctggcttagtttttaagaggctcaagcggtttgtccacctctatcgattccccggcttcttttgcttcttgttttttcttcattttgccctcttcgctcgtaaattcattttcgatgtttgaaaacgatttttcgaaaatttccatgaaatcatcgccgtaaatatggcggatgatcgacatcatctcgacgatttctggaaacttcccgtacagctgatgaaggggctgagcgccttttaagacggcgttccgggtcggatcgtaagactcgaggattttaaggaaaacttcttcacctttcggagtcagctgaatgtaagtgttgcgtttgtcattcaattttttggaaaactccaggtaacctctttcctcaagcttttttgaaaaattaaacgctgtggatacgtgcatgacgccgaacttggcgatttctgaaatggatgctccgttcagctggtaggcgatccacaaaatatggtgctcgttaatgttcagatcataaggtttaatccactgctgccaatccttttctatcgacttccaaagcgccttgctaagctgtgccattctttgactgaataaaagggcttctttcaccgtatagggctcttccgctcgattcattcacttcacctgcttctctttatcttataatttctattatgccaataaaataaagattaataaagatgtaaatttacgaaatttttaaaaaatccagttttacggtgtgaaatcaggattttacctaaaaaaggagcgtgaaaattttccattcacaccccttttttaaggttttatttttttcgctgagtatattagttttgtaaggttttctccagctgttttatcttttcttcgatctcagcgatttccttttttaagtcctgctgatgaggtttgatttcctcgcgccattcctggatggacgtttgcagttcgctgccgacgtctttaatgatttccgcgccttctatggcggttttgacgaattgctcttttaatgcgattccgtcgtttttcagccttttgacggtgtcttcccatttaccgcagttggctttaagctgtcctctcaagttttttcctgaagtcggcgcggtcagcaatgctgcaacaccgccgataacaccgcctacaatcagtccagctgctaaagatcggccttttgacatgtaaatcaccccggttatatttttaaagatcaggcttggcaggcgccggccttctcatgattagatattggcgtccgagccgggcaaaccgttcctcttcttagaaacttctgcatagcttgcttttatttttagcatacttttttaaaaaggagggagagggttgtctgtcataatcattgttttgacaattataagcgctgtgtttaccgccggctccttttattatttaaggcttctcggatattctgcatcttatccgccgaaacgcattcttaaacaaaaagcgcttttttgcacgggaagcgcagggttggcgctcctgcttcctttttttttattcagcttcttatataaaatatcgggcggattcccctttttttgaccatcaaaacgaaaaaaacctcttccaaaaaagatattcctttactagaagaggttcttgttttatttgacttgttcaatcagccttgaacgcttcatgatcgactgcacgatcggaaagatgaccgccatggcgatcgtgttgatcacggcagctggtaaaacgacaacagagaacagggtgatgaatccctgatttccaggcaggccgacaatgaacagtgcagccgtgaggaaaatcgttccggaaagaacggttcctgcagcagttaatccggcggcagcaagcgttttgctgttcagctttttcacaagcagaaatacgccgaagaacatcaaggctgttagcggtttgtcgatgatgttgggcagctgtcccccgggaaaagccgtcgtcaacgcggaaatgacgcctgtcacggctccgatgacgagaacattttgcagtctagggaacaaaaggattcccataaacatcatgatcagcatcatatccggcttcattccgtagaaaaaaggcggaatcacagcgtgcagcgccgctccaatggcgacaaacagggccatagccactaattcttttgttttcatgtctattctctcctcatctaggctctttttacgctttccaataatatgctcgtcatttattgcgaaagctttctagtagtatatcaaactttcgaaggaatggggaagcctttttcgccatcttccatcatcaggataaacatcagttttcttcgcggaatttcttcataaaggcagccagcttttcgcagtcttcaactgatacggcattgtaaatcgaagcgcggcagccaccgaccgaacggtgtccgccaagccctgacattttttcttcctttgcctttgctatgaatgatgctgtcagctcatcatttttgagcgtaaaggtgacgttcatgtttgagcggctgtcttctctcgcatggccgcggtagaatccgccgctttcgtcgatcgcattgtataaaattccggccttttcgcggttgcgtttctcaatggcatcgaggcctcctttttccttgagccactccagcacgagagacagcatataaatcgcaaatgtcggaggggtattgtagagcgaatccgctttggcatgtgttgagtacttcagaattttggcaacttgctcattttccttgccgagccagtcttttttcatgatgacaacggtcacccctgacggtccgaggtttttctgagcgccggcatagatgatgtcaaattgggaaacatcgatttttctgcttaaaatatcgctggacatgtccgcgacaaccggaatcggagcgtcggggaacttttgccactgcgttccaaagatcgtattgttggaagtcaggtgaaggtaggccccgtctgccggaatctccggtacttcaggaatatagctgtacgtatcttctttgctggacgcgatgatcgatgtgtttccgaagagctttgcttcggccagcgctttttcagaccaagcgcctgtcataatgaagtgggccgttttgtctttggagagaaagttcatcggaatcattgaaaactgaaggcttgctccgccttgcagaaacatgacttcataatcatcaggtatgtccatcagttcttttaacagagctttcgctttttgatgaacggcgtcatactctttgctgcgatgggacagctccatcacggacatccccgcaccattgaaatcaagaaattcgtcttttgccttctgaagcacttctaaaggcagtgctgctggtcctgcgttaaagttcgttgtacgtatcatcacaatcgctccctgttcgtgtataaaaatataaaacaatcctatcataaaaggttccggttatacataaaaaatttgaattgtgtgaaatatagagcaatggctatttagccgtgccgggcgatctgataaatgtggagtttttttgaacgaaaaaagggcgccggcagctgccgacgcccttggacaacgtctcgattacaggtgtttgttgatggaagctgcaatgttctgcaagtcttccggtgaatagtcatccgcatgggttttccagacggctccgaatccgtctcctttgccgtagcggggaataatgtgcatgtgataatggaagacggactgtcccgctttttcgccattgttattcagaaggttcaagccgatcggctcgtattcgtctttgatggcttgcgcgattttcggaaccgcttcaaaaaactctcgtgaaacttcaggtgtcatttcgtaaatattggttttatgaacttttggaatcacaagcgtgtgtccttttgtgacttggctgatgtcgagaaaagccagcacatgttcattttcaaatacctttgcacaagggatttccccgtttatgattttgcagaaaatacagtcgctcatacttttcctcctttttccattagggaaaggttatgtataagcaacatattaccacaatttgcgcagaaacacgaaaaacaggatgaacggctccaacgttcaccctgcctgaagaaggttacgctttaatgaagaaacgttaactgccttttgcaagcaccccatttttcgtcaaaatgaagacttgtaacgcctatacatttcctgcgacaaacacctcatttgatcgtcacaccttttttatatgacgaagacgtcaaataaagcaggtgctttctcaattcagtggatgaaagaaatttctaagcttgacatgtttcatactcaggactcttgccggattttgtctttgacaaacacctcattcgccagagttgataagctttcccttcttcaagaattagaatgtcctaaggcgctttcgattattcgttttatttttacggccgaaaagcgggagggaaaacgtttcaaatacattcttgtttttggtactattaagaaaaatgcaggaaaggaacgaacgtatgtcactactgactgttaaagagttaactggagggtatacaagaaacccggtgctgcgcgatgtttcatttgcgattgaacgggagcagatcgtcgggctgatcggtttgaacggagcggggaaaagcacgacgatccggcatatcatcggcttaatggaaccgcacaaaggatcggttgaattgaacggcaaaacgttcatggacgatccggaaagctaccgttcccaatttacgtttattccggaaacgccgattttatatgaagagctgacattgaaggagcatttggagctgactgcgatggcgtacgggctttcgaaggaaacgttcgagaaaaggctgccgccgcttttgaaggaattcagaatggagaagcgtctgaaatggttcccggcccatttttcaaaaggaatgaagcagaaggttatgatcatgtgcgctttccttgtcgaacctgacctgtacattatagacgaaccgtttctcggtcttgatccgctggcgatcaatgcccttctcgagcggatgaatgaagcgaagaaaaacggctcggccgttttgatgtcgacgcatattttggcaacggcagagcgatattgcgactccttcatcattctccataacggcgaagtgcgggcgaaaggaacgcttgaagagctcagagaacagttttcgatggaagaagcgagcctcgatgacctgtatcttgaactgacgaaggaagagagctatgaatagcattctggggatttggaagacaagaattgaggagtatgtcaaagaaacaagatcatatttgaaatacatgctgaatgaccaccttgtcatcgtcatgatttttttcctcgctggagctgcgagctggtacagcaaatggctgaaagagatgcccgaaggttttccagcctattgggtgatggccgtcatcttttcgctcattttgacaggctcgtacgtccgcacgctgattaaagaagctgaccttgtctttttgctgccgcttgaagcaaagatggggccgtattttcagcaggctttccggtttagttttttgacgcagctgtttcctctggccgccgcggccctcgctttggcgccgctgtattttgaagcaagcggcaaggggttttccgcgtacctcgtcttgctgattcaactgctcgtcttaaaaggatggaacacggctatgcaatggcggatgacgtttttcggcgaaaaaaacatgagggttaccgaccggtttgtcagactgcttctcaacacgatcgggatctatttcgctttagagtcttcatacgcatttgccgcagctgtctacctgatcatggccgcactgtatgtgtattttaaggtgatcgataagaaaaaatcgtttaaatgggaactgcatattgaagacgaaatcagaagaaagcagcggttctacagaattgcgaacttattcacggacgttccccaccttagaaaacaggcgaaaagaagagcatatctcgattggatgctccggtttattccgtatgaacagagccggacatttacatatatgtacggaagggcatttatcagatcaaacgactatttcggcatcgtcgtcaggctgaccgtgatttttggcatcatcatcgcttatttttcggcatatgagtgggtatcggccgcgctcatcgtcttcaccgtattcattacaggaattcagctgacgccgctgtttgatcatttttcacacctgccactgcaggagctttatcccgtcaaagcagaagaaaaacggaagagctttttcggcctgcttcacatcgttctgagcgtccaggcgcttgttttgtctgccgctgccggagccatgatgcagtggaccgggatgctcgccggactggccggatccgcgctgcttatatttgtgattttgaagccttatttcagcagcagattgaagaaaagtgccaagagatagatgaatccttttctttttccgcaagtatgatgaaagaagaggtgagtggcgcatgaatgaaaaccagctatatttggaggaagcgacccgctggaaaatgaagtttctcagaaagccgtcgatggctgagcggatgtcgaaaggggtacagtcgaaaattaacgcccgcattcccgccaaagttcacaaggcgataacagaaagcattaaaaagatggtcgaggctactttgctcggctcaaatttaacgacttttgacaagaaaacaggcacgctttcgctaagggaaaaagatgagctggctcagaagacaatcgctcaatatcaaaaggcggctgctgttgaagggatcggaacaggcgcgggcgggatttttctcggactggcggactttccgctcttgctcggcattaaaatgaaatgcctgtttgaattggcgtcgatttacggatacgatattaaggagaaagaagaacggatgtttcttctgtatatttttcagctcgccttttccggagaagcgcaccgaaaagaaattttccgcatgatcgaacattgggataccgaaaagcgcgaaatcgattggcaggcttttcagcaggagtaccgggactatctcgatcttgtaaagctgcttcagcttgtgcccggcttcggcgcggtcgtaggcggaacggctaactataagctgcttgggcaccttggggaaacagcgaggcacgttttccatctgagattgattcatgagacagccggatattgatgatccggctgttttttatgctatttcggttgttccattgcaggcgtttcgcggaccgcctgctctttctcctgataggagaccgcggcatttgccagcactttggctgcgatcagcatcgctttttcatcgatatcaaacttcggatggtgatggggaaacaccgcctccggatcttcaggacgggcgcctgtgaagaaaaatgtccctttgacgtgctgcaagtagtaagcgaaatcttccccgcccatttgcatgccgctttcttcaactttttcaacgccttccgtctgtttggcgatttttgcgagaaaagacgtttcttccgggtggttgcagacaggcggatagcccctttcgaaggaatagtcgcagtcagcgccatgcatgccgcatataccttttgcaacctgttcaatttcgttttcaatcaaggtgcggatttcttcattgaaggaacgcgccgtcccgattaaaacggctttatcagcgattacattaaaggagttttcggcaacaaatgaacctatcgaaacgactgccggctgagtcggatcgagcctgcggctgacaatctgctggagtgaagcgacgatctgcgatccgatcaacacggcgtcttttgttttatgaggctgtgcgccatgcccgcctttacctttaatcgtaatcgtaaaacggtccgcagcggccatgatcggtcctgttcgatattgaacggttcccgtcggctccgtagcccacaaatgggttccgaaaatcacgtcaacaccgtcaaggcagccgtcttcaatcatcggcctggctccgcccggcgaatactcctcggcatgctgatgaatgaagacgatctttccttttaaacggtccgcgtgctcattcaaaactttagcgaggacaagcagggttgccgtgtgcccgtcgtgtccgcaggcatgcatgactcccggcacagtcgatcggtaaggcgcgtctttttcatcatgaatgggcagcgcgtcaaaatcggctcgaagcgcaatgacggggccgggagatccgccttcgatgtaggcgagaactccgcctccgcctacgttggtgcggataggaataccgagcgcttcatagtaagaggcgataaatgcggctgttttcttttcttgaaaagaaagctccgggtgctgatgaaaatggcgcctcaatttgaccatttcatcgtagtgtgcatcaagctgctcattgatttgtcggatgaatgcggatgcgctcaaaaaaattcctccttttaggaatggtaagtttttataattttatgacaattggagccgctgttcaaccttgctgtcccgtatttatagaagaaaaatggcggcaatcgttgtgacggttaatccggcagctacaggaataaagttttttctggcaagatcgaacgggtcaactttgcaaatcgctgcaactggaatgagcgcccatggcacaagcgtaccgccgccgacccaaatggctgagatttggccgagcgcagtcagaacggctggattgctgtcaaccgccgcagcaaacatcgaagcggctgatcctgcgagagaaatccccgaaaatccggatccgtcaagaccggtcaccgctcctgtgacagtgagcgcaacagcggcgatttccggagagagcggaacgctgtgggcaaaggccgagccgaggtcctgcacgatcctattagaaaaaccgggaatctctgctgtcagtactttttcaaaacccgcatcgcccaagtaaaaaaaggcggcgattggaatgacgggggcaaacactttaaagccaaactgaaatccgctaatgaaatagccggtgattttctcaagacgccggtgtttgtggacgataaaatgaatgagaatcatgacgaagactgccgttcctccgacaagcgccgtcgcttcgtccccctgcagttccaatatcagcatcgcggcgatatcccctaaaaaaatgaccggaatcaacagcgcgagccattttctggaggtctggggaagaagccactcaggctcgctttgcagctgcttactggccgctgctctattgcctttctctttccggagcatcaaaaaggctgcccccgttgtcgaaaagcccatgatcaagacgagcggaacgcttgcagacatcacttccgcaacgggcagcccggctgcatctccggtcaatttaggcgctgcctggatgatgtaatcgcctgataaagcgaaaccgtggccgaataaattcatggcgcacgctaccgccatcggggagaggccggctttcagcgcggcgggcaggaggacggcgccgaccaatgcgacagccggggagggccaaaaaaatgaagaaatgataaacattaaagctccggtgatccagtaggccaaggcaggacctttcatccatttggcgatcggagtgaccattgcttcattaacgccggtctttgccagcagttcgctcatcgaaacggtaaagcagatgatgaaaatggtcgggagaagttctccggcggcgtagattaagctgttgaacaggcccatcacagaggcaatggcagaatgggtcgccgctaatgaaatgaaaaaaaccccggcaagcgatataaaggtggtatcaagacgaagaagcataaatgcgagaattgcagcgataaagcccaaatatataaagtgaacggacgttaattcaatttccatttcccgatccccccgttaacatagcctcatacagcttattcctgggctgtcagagtgtgaaggaagggctcatttcctcggaaataaaaaactgcctaaaaggcagttattcgacagaatgatacgaagaaatataggatgggcgggaaaaaatcgttccgccttggttgattcctgcggaagattccttcttttggtgggcttcgctgaacgacttggagtttttccagtcttgaaatgactgttctgtgtcccacagtgtcaatacgatatacgtatcgctgtctttcggcctcagcaccctgagggctttaaagccgggctgattttcgatttttccggctctgtttttaaaacgggcttcgaaaagcggccttccttccggtgtgacagggatgttgttgaggacggcgaatccggaatgttccaaagatcccgactgatcgatgatttcgtagcggtgaggagaatgaaagacgctttctccgtcggtttcgtgaaagagaatggcggaatcgtggcttttcataaataacatgttttcaagaccgtgctgtttggcgagcttttttaaaaaatcgacagttccgtatgtaatgtaaaaattcaattttatcaccccttttttgatagtataacaaaaggacgatttaaaattctatccattacccgctataaatgctgcaacataatttgaagaaaaaattcccatactagctatagaaaggaatgaggtgaccatatgagaaagagatttttcattccaatcatcattacagcggcgatattccttttatcgttaatcggatatattacgattttgtttctgggggattatgtgattgatgaaaagaaactgattttccatgcttcttctaaaatcgtcgaccaaaatggagaagaagtcacaagcctctatactgaaaacagaagacctatttcaattgccgaggtgccggacggcgtaaaaaatgcctttatcgcggttgaagacaagcgcttttatgagcaccacggcatcgattttaaatccgtgagccgtgcggtctataaagatatattagcaggaggaaaagtggaagggggaagcacgatcacccagcagctcgcaaaaaacacttttttgacaaatgacaaaacgtttttaagaaaaacgaaagaagtcattatcgctatcaatttggagcgggattacagcaaagacaagcttttggaaatgtatttgaaccagctatatttcgggcacggcgtctatggaatccaggcggcggcaaactacttttttagcaaagatgtgaaagacttgacggtcagtgagggagcggtgctggcttccattcctaaagcgccttcaacgtattcgcccattctcaatccggaaaaaagccgggagcggcgcaatgtcattctcggcatgatgaacgagcagggatatatcagctcaaaggaaaccgtcagggcccaaggcagcacattggggctccatgtgaaagaaaaatcaaaaaatccgtggcttgacagctatattgatcttgtcatgaaagaagcggaagacaaatattcgatttcaagtgaacagcttcttcaaggcggatacacgatcagtgttccgctcgacgtttcgatacaaaaagcggcttacacgctgatgaagcaggacggctattttcccggaacagacaataaagctgaagggagcgccgtttttatcgataaccggacaggcggcgtagtggccgctctcggaggtcgggaatacgctccgaaaggctacaacagggcaacagccccgcgtcagccgggttcgacttttaaaccgcttgccgtttacggccccgctcttgaagaaaagcggtttaagccgtactccatgcttgaagataaacagctgtcatacggcggctactcgccgaaaaactatgacggccagtacgagggcaaggtctctatggtggatgcgctgacctacagcaaaaacgcgcctgccgtatggacgctaaatgagatcggaatcgaaacggtgaagccttatctcagccgcttgggcatgaacgtgccggatgagggcctggcattggggctgggcggcttagagaaaggagtgtcgccgcttgagattgccggggcataccggacctttgcaaattcaggacaatacaccgagccgttctttattaaaaaaatcacggacgaaaacggggatgtcatattccgccgcgaggaaaaatcagaaaaggtattcagcaaacaaaccgcttggaacatgacgcgaatgctagaggaggtcgtgaaaagcggaacgggaaaagccggtgatttttccggagagattgcaggaaaaacgggctcgaccacgtataccggaaaagagggcggaacaaaagatgcctggtttgcggggtatacgcccgaagtgacgggagctgtctggatgggctacgataaaacggatgaatcccattatttaaaaggcggcagcgcttatccgacaaggctgtttaaagacattttaaaacgctccaaccataagcctgaacgatttaaggcgcctgaaggtgtaaaagatctggacaggccgatccgcctcgaagatttggaaagtgttaaagcagactattcctttacgccgatggggctgattacggtgtcattaaaatggcatgaacaagaggataaaagggttgaataccgaatatatgaaaggaaaaacggaaaagaaacgctcattgatacggttaaggggaaaggaagctattcaatcccttatgcaaacatcttttccaatgcttcctataaaattgttccgtacaatccgcagacgaaaacagaggggaaagggactgattatatcgaaccgaaagtgtttccttcgggtcattaggtacccgaaattcatcaatttcttgaacaataagtctcatgagtataccgttcaataaaaaaacggtatattggaaggagtaattttgcgaacgtatggttgcagcttgaaaaggtggatatcatgatgaaaaacgacaaggcttttaatgacacattcttaaaagcgtgccgaggagaaaaagccgcccatgtaccggtatggtacatgaggcaggctggaagatcacagcctgagtacagagcgctcaaggaaaaatacggactgttcgaaattacgcatcagcccgaactgtgcgcttacgtgacaaggctccccgtcgaacagtacggtgtcgatgcggcaatactttataaagacataatgacaccgcttccaggtattggcgttgacgtcgaaattaaaaacggcatcggtcctgtcatcgatcagccgatcacatctctcacagatgttgaaaaactcggcgaactcgagccggaggagcatataccatatgtgctggagacgatcaggctcttgacagaagaacagctgaacgttccgctgatcggttttactggggcgccgtttacactggccagctatatgatcgaaggcggcccgtccaaaaactacaataaaacaaaagcgtttatgtacagccagcctgctgcatgggacctcttgatgaaaaagctcgggaagatggcggctgtatacgtcaaagcccaaatccgcgccggcgccaaagccattcaagtgttcgattcctgggtcggcgcgctgaatatcggtgattactgccgctatatcaagccgacgatggacattcttttcaaagagctgaaaaaagaaggcgtgccgctgattatgttcggggtcggcgcaagccacctcgcgactgaatggcacgatcttgaccttgacgtcgtcgggttggactggcggatgagcgtgcaggaagccagggataaagggctgacaaaaacgcttcaggggaatttggatccttcgatcctcctcgccccgtgggaagtcattgaagagaggacgaaagccattctcgatcagggcatgcagacggaccggtttattttcaacctcggtcacgggatttttcccgaagtgagtcctgacacactgaaaaaattgacggcatttgttcatgagtattccgcctcaaaaaaatcgagcctgatgacatgagcatttcagttggtcttttcaatataaactgtcaaaatacgtatagatcatgatctttaaagaggtgttcacgttgggtaaaaagaaaatggggcttcttgttatggcgtatgggacgccttacaaagaggaagacattgaacgttattatacacacatcagaagaggcaggaagcctgagcctgacatgcttcaggacttaaaagaccgctataaggcgatcggcggaatttctccgcttgcaaagatcacgcaagagcagacgaagcagctggaaaaacgcttaaacgagcttcaggatgatgtggtattcaagtcatatatcggtctcaaacatatcgaacctttcatcgaggatgccgttcaggagatgcataaagacgggattacagaagccgtcagcatcgtgcttgcgccccatttctccaccttcagcgtacagtcgtacaacaagcgggcgaaagacgaggctgaaaagctcggcggattgtcgatcacatcgatcaacagctggtatgatgagccgaaattcatcgcatattgggcggatcaagtgagaaaaatctatgacgaaatgccttcggaagaaagggaaaacgccgtcttgattgtatcggcgcacagccttcccgaaaagatcgtcgaaatgggtgacccatatcctgaacagcttaaagaatcagcgaagctgattgccgaagcggcgggtgtaaaagattacgccgtcggctggcaaagcgaaggaaacacccctgatccgtggcttgggccggatgttcaggatttgacccgtgacttgtcagagcaaaaagggtacagcgcttttgtttatgctcccgtcggcttcgtagctgaccatttggaagttctttatgacaacgattatgaatgcaaagtcgtcacagacgatatcggagcaagctattacagacctgaaatgcctaacgcaaaacatgagtttatcgatgctttagcagatgttgtattaaaacaattggagaaagaacagtaaagaaggcgattgtaaatgagtggagaacgcaggcagattgtcatcatcggcggcggtattaccggattggccgccgccttctacttggagaaggaaatcaaaaagaacgatctcccggccgaagtcacgcttgttgaagcaagcccgagactgggcggaaagatacagacggtacacaaagacggctatgtgattgaacgggggccggattcatttttggaacggaagcaaagcgcacctcagctcgtgaaggatctcgggctggagcacttgctcgtgaacaacgcgacaggccagtcttatgttcttgtcagcgaaacgctctatccgattccggaaggagctgtgatgggggtgccgacaaaaatcggaccttttctgacaaccggcttgttttccttgccggggaagttgagagccggaatggatttgctgcttccagcgagcaagccgcaggaagaccagtcgctcggagaatttttcagaaggcgcgtcggcggtgaagtggtggagaacctgatcgaaccgcttttgtcaggcatttatgccggggacattgaccgcctcagtctgatgtcaactttcccgcaattctaccagacagaacagaagtacagaagcttgatcatcgggatgaaaaaatcgcgcggcgcccagagcgccaaaaagcctgcgaacaaaaagaaaggccagttccagacggtgaaaaccggcctgcagacgattgttgaagaactggaaaagcagctcgatatcacaaaggtttataaaggcacaaaggtcgtcagcattgagcgcgcgggctcgggctacagcatgaagcttgacaacggcaaggtgcttcacgctgattcggccgtggtcaccgctccccataaagcagctgccgcgatgtttccaaaagcggattggctgaagggtttagaagatatggtgtcaacatctgtcgccaatgtggcgctcggatttccggaagaagccgtccaaatggagcatcaaggaacaggctttgtcatttcaaggaacagcgacttttcgattacggcgtgtacttggacaaacaaaaaatggccgagcacaacgcctgaaggaaaagttctgctaagggcttatgtagggaaagccggcgatgagtccgttgtcgaacagtcagataacgaaatggtgaaaatcgtcctcgacgatttaaggcggattatgaagatcgacggcgagccggaaatgacctgcatcacaagatggcatgaagcgatgccgcaataccatgtcggccataagaaaagaatgaaagagatcagggaagggttacaggcgtcatatccgggcgttttcatgacgggggcctcatttgaaggggtcggcatccctgattgcatcgaccaaggcaagcaggccgtcgccgatgtactctcacaccttttcgaataaagaagagcaaataaagctgtccgaatccattcggcggctttttttatttcactctttttacagctttcatcattttaaagtttgtttatggaaaagataacatttaaattattgcattttatattcaggtgtgttacattactttttgtacttactgaccaaaatgttcaaatagtcaatttcggggtgagaaaccgtgagcaaagatcgaaaagcactgattttagaagcggcgacaaaatcgtttacacaattcggctacaaagcgacgacgatggatctggtggcgaagcttgccaatgtcggcaaaggtacgatttatacttttttcaagaataaagaggaactgttcgacgacattttttcttcgcttctgattgaaatgaagcaaacggctgatcaagcgattgatcctgatctgccttttcacgaaaatgcccatcgcgcgatgatggcgatattggaatacagaaagaagcaccagctgaccattaagatctttcaggaaggtgcggagctcggcacaccggcggcccgcgaggtgattgaaaagctggaacgcatggtcatcggctatattaagagaaaaattaaagaagcaattaaaaatgacgatattagaccgtgtgacccagagctgaacgcgtttgtcatcttcaagctttacatcgcgctcatctttgactgggaaaaaaaccatgaaccgctgaaagatgaagagttggcagagatgctgaaaatgtatattttaaaaggattatctcgttagattatcctttctttgtttaaaggggtgcttagtcgcgtaaggagagcggctactaactaggaggcgtatcaacatgaatgttttcaaaaaccagtggagagaactgataaccaataaaaaactactgatatccgtgatcggggttctctttataccgctgatttacagcagcatatttttggcggcttactgggacccatacggaaacgtcgatcagctccctgtggcggttgtgaattccgacaaggggacgacatatgaaggaaaagaccttcatatcggcgacgaccttgtcaaagaactgaaagaaaacgataaattcgactggcattttacgacgaaggaaaaagcaatgagaggcttgcaaaatgaggaatactacatggttgtagaaatccctgaaaacttttcgaaggatgccagcacggttatggataaacatccgaaaaagctgaatctgatttatcatacaaacgccggacgaaactatgtcggcgcccagatcagcgataaagcgattgaacagcttcagcattcagtcggctctgaaatcacggagcaatatgctgaagtcatctttgacaatttcggcaaaattgcaaaaggtctcggtgaagcaagcgaaggagccggaaagctggataaaggactgaaagatgcgaaagaaggaagcgaaaagctgaaaaagaaccttgaaaagctcgcgaaaagccaaattcagttcaacaaagacggaatggagaagttcggcgcggcattcaatacgctgaacgacaaaattcatgagcttgattccgggcttgcacaatttttggaaaaaagcggccagctgcacagcggtgctcaacagctccaacaaggcatgcctcagattgtggcgggattggagcagatgaatgaaaaagcgcagaagataagcaaactcgaagaagcgatttcaaatgaaaaaattcagcagctcgaaacggcgctttcaaatgccgaaaaagcgaaaaaagaaatcagccagatttcgaaaaatattgatgagcttgaagcggcattgaaaaaccagcacagcgaagtcaaacaaattattgaatccagcaacatgctgacacaagaacagaaagccgcgcttatgaaacaagtcgatgaaaaaatgggaacggtgaaactccctgagtttgacaagttgaaagcgcaaattcccgatgtcagcgaacttcccgatttatccgggctgaaacagaagcttgaggaattgaagcgagtcccttcggatgtgaataaactttataaaggatcgcagaagattcagcaagggcttgatgcgctgacaaacggtttgggtgcttacaacgaaaaattcgcagaagcgaaaagcggatcatccaaaatcgccgaaggcagccagacgttagtcggaaagttcggcgatctgcaaagcgcggccgataaactgaaagacggttcttccaaacttgcagaaggggctaaatcccttgatgaaggtcttggcaagctgtctgacggaagcggggagctgtttgataagctgtctgacgctgccgatcaaaccggcgatattcaagcgggagacgaaaactacaatatgttctcagaccccgttgatgtgaaaggcgataaaatcgatccggtttccaactacggaacaggattaaccccgtatatcttgtcgctcggcttattcgtcggcgcattgatgattaccgttgtcttcgatgtgaaagagccggctgtccggcccgaatcagcctttggctggtttatgagcaaattcagcgtgctttttgcagtgggaattcttcaagcggcgattgcctgcacgatcattctctggggcatcgggcttgaagtgcaaagcgtctggagattctatctgttcagtataatcatgagcattacatgtcttgcgatcattcagtttttggctgcgacaatgggaaatccgggacgattcattgccgtcattctgctcgtgcttcagcttggaggaagcggaggaacatttcctcttgcacttgtccctaagttcttccaggtcatccattctgcactgccgatgacctacagcattgccggatacagagcggtgatttcaagcggagactacgcgtatatgtgggaacaggctgccgtgctcggcggtgttgcgatcgtcatgatggctctgacgctgacttattttaaagtgctgctgaaaaaaggaaaaattgaagagcagcatgcataaaagaaaaacatcttttcaagcccggcaagggcaagaaaagatgttttttttgatattaggaagctggcgcgccccattttacaatcagtcccgtatatgtaagccccccgccgaaaccgaacagaatcaaggtatcgccctctttcaactttccgtttttgacggcttcatcaagggcgagaacgattgatacggatgaagtgttgccaaaccattcgacgctcgtcaacgctttttcgagtggaattccggttttttcgcaaattgattcgaccattcgcaaattcgcgctgtgcgggacgaaccaatcgatatctttcagctccatttcagcttgggtaagcagctttttgacgccttcgggaatggacctgaccgcccacttatacacttcgcggccgttttgaaccatttttccttcgcctgagagcggctcccctttaaggtcgcttcgcaagccggttctgtataaatggcgggctccgtcacctttcgtatcctgggcaaaagtaatgaagcttggggctttgtcgtcccgttcgacaagcaggacgcccgcgccgtcgccgaacaaaatgcaagacgcgcggtctgtgtagtcggttgtttttgataaggtttcaccgctgatcacaagaatttttctatgcagtccggaagtgatcaggccgttggcgatatgcaatccgtatgttaatcccgcgcaagtcgcatttacatccaccgcgccgacttcgttccatccgaagtgctcctgaacctggcatgccgtgcttggaaaagcgtagtccgccgttgtggtagagacgatgatcatgtcaatatcgtcaagcgtgccgttgtatctgctttgtagattttcaacagcctttatgcaaagatctgatgtgaattcgtgacttccggcgattcgcctttctttcattcctgtccgctgaacgatccattcatcagaagtatcgacgatcttttcaaagtctttgtttgtcatgcgcttttctggaacataggtgccgatggcggaaattcgcgcttttgataaagttttcatgaagttcactctccttttttttattataacacctagtattagtatctggtactaaaacattgatctgatgtatactataaacatcacaagttgggaggaaggaaatatggcaggacagaaaacgctggagctcatcaaggagctcgtctcgatcccgagccctaccggaaatacgtatgacatcatagactatatcaatcgcctattacaggaagaaggagtcgaaacaaagtttaaccgtaagggggggctgatcgcgacgataccgggctctgacaaatcccggcacaggatgctgaccgctcatgtcgataccctcggagctatggtgaaagagattaaaccgaacggaaggctgaaaattgatttaatcgggggcttcaattacaactcgattgaaggcgagtattgcaacattgaaacagcatctgggaaaacttacaccggcacgatcttaatgcatcagacatcagtgcatgtatacaaagacgccggaaaagccgagcggaaccagaaaaatatggaggtccgcattgacgaaccggtcaatagtgaagaagaaacccgggcgctcggcatcaatgtcggcgattttatctccttcgatccgcgcgttgaaatcacgccgagcgggtttatcaaatcgcgtcatctcgacgataaagcaagcgtcgccctcctcatcgagctgatcagaaccatcaacacagaagggatgacactgccttatacgacgcactttttaatttccaacaatgaagaaatcggttatggcggcaactccaacatcccgcctgaaacggtggaatatttggctgttgatatgggagcgatcggcgatggacagtcaacagatgaatatacggtatccatttgtgtaaaggatgccagcggcccatatcactacgggcttcgaaagcgcctgacagccctttgtgaagcacatggaatcgattataagcttgatatttacccatactacggttcagatgcttcagcggccgtcaaagcgggccatgatatcgtccacgggctgatcggcccgggaattgacgcatcccatgcgtttgaaaggacgcatcaatcgtccttggagcagacggcaaagctgctgtatcactatgttcagtctgacatggcataaaaaagctcccaaaggaccccggtcccttgggagtaaaaaaagagtggaagtcatccatccgtaaaggatggcgtttacttaccagtaatcatagtgttttttctttttgcagtgatcatagtggtcatacttcttgtagtcatagtcataatcatacttcttatagcatggataatagtagtaataatagtagtagtagtatttcttgcagtcgtggtctttcttgtggtagtcatagtcgtaatctttcttgcaatggtcatggtaaaaatacattaaacttccctccagttttcttttctaatttaactacagtacatcgtatgtaaaggaaaggaagttgtttggacaggtttcttgagtaatttgcatatttttgaaaaaacgtatgtttctccaaaagcgggaaacatacgtttttttgcgagctgtcagccggatacttctatatctgccggctcccgttgatttaagacgttctgccctttaacggcgtcatattcaccttcccattttgacatgaccacagcggcgagagcgtttccggtcaagttgacgaccgttctcgccatgtccataatccggtcgactccggcaatgaaggccagcccttcagcaggaacgccgatcgtgcccagggttgcaagaagaacgacgaatgatgtgccgggaacggcagccattcctttagaagtgaccatcagaacaaggatgagcgtgagctgctgtccaatggacagatcgatgccgtagacctgcgccagaaacagcgccgcgatcgcctgatacaggacagagccgtcaaggttaaatgtgtagccgatcggaatgacaaacgacacaatgcctttcggacatccgattttctccattttttccatgacgcgcggaagcacagtttcagagcttgatgtactgtatgcaagaagaagctcatctttcatataggccaaaaatttaaatatattgataccgcacagcttgccgacgatcccaaaaatgacaatcaggaagaaagcaagagcaagatagacaagcaaaacgagctttcctaatgataaaagcgaagaaaaaccaaattttgaaaccgttacaccaattaaagcaaaaacgccgaacggcgcgaatttcatgacgatgttcacgacgtggaacatggcttgagacgttgcctcaaaaaaggagagcacaggcttgcctttttcgcctatggctgacactccgagtgcgaacagaacagtgaagcaaatgatcgcaagcagatcgccttcagcgagcgattggaaaaagtttgtcggcacaatgtgcaggaacgtgtctgcgacagatttggtgcttgcctctttttctgtttctacatattggctgatatcctgtttttcagcaccagaaaagtttacgccgtgtccaggttgaacgatgtttccaaggagaagtccgagcccgatcgcaaaagtcgtaatgatttcaaagtacagaatcgtccgaaaaccgagcctgccgacctttttgccgctgccggcccctgcaaccccgacaatcaagcttgaaacgacaataggaatcacaatcattttgattaatcttaagaacaaatcaccgacgggctgcagatacgttgcgactgcagggtttccgaaccaaatcgctcctgctgcaacacctaaaatcagccccaggaaaatttgtgtggctaatccgaatttaagtcttttcatagatgccctcccaacgcatgcttaattttatactagaatattaaacttgagatcgtaaattaagtatagcgaaagaaaatgcaactcgtccattaaaaaaataacgtctgaatatattgaaaattcaaatatgagataattatcccagcttaaattcaaaccgggacgttcatcggtgtatatttccctaagtgaaatagtaaaaagttattaaaataatgaattttgacaagaatctctctctttataactaactttatgacaaaataacgccccggggaatcacccggggcattttttaatgacgtctatatatcttttacatttaagcatttagagcaggtgtttccgtagcattcgtgctgctcatcaatatcgtggccgcacactgaacattttttggaaggcaaatttctgaagaactcggtgattttagcgagcatgttgattcccccaattcgtttgttgcaatcattgtattataacagataccggaaaatcaatgtctgttttatgacaaaatataaaacatgcaatttttaagaaaaatgggtatattgaatagggggacgatagacacgaaaaagaggtgtgtatacatgaaggtgacagtcatcggctgctgcggaggatttccggctgcaaatgaagcgacttcaggctatctctttcaatcggggtattattctgttttaatcgactgcggcagtgccgttttatccaagcttcagctgtttctgcccgttgaggagcttgatgccgttatattatcccattatcatcacgaccatattgcggatgtcggccctttgcaatttgccaaactggtcggttcattcctcggcaagggggcgaatgcccttccgatatatggacatccttttgatgaagagcagttttcaaagcttacatataaaacgcataccgctggattagcgtatgatccgacacagcctttggctatcggaccgtttacgttcacgtttttaaaaacggttcaccctgttgactgctttgccatgagggtgacggacggtgttcattctgtcgtttatacggccgactcgagctttcagaaagcctttatcccgttcagcgaaggagccgatctcttgatctctgagtgcaatttttatgcgggtcaggatgggggaagcgccggtcatatgaacagcctcgaagcggggcgcattgctgcggaagcgggtgcggggcagcttctcttgacacacctcccgcatttcggggaacatcaaaaactagcagaagaggcccaaaccgtttataaaggcgcggttgatctggcgcacaccggttatgtgtggggagaatagaaggaggaactgacaaagatgctgtttatcgataatcaaaatattacagatccgaggatcaacttggcgattgaggagtactgcttaaagcaccttgatcctgaagagacgtatctgctgttttatatcaaccagccgtcgatcatcatcggcaaaaatcaaaatacgatcgaggaaatcaacacaaaatatgtagatgaaaacgggatcattgtcgtccgcaggctgtcaggcggcggagctgtctaccatgacctcgggaacttgaacttcagttttattacgaaggacgacggcaacagcttccacaactttaagaagtttacggagcccgttgtggctgctttaaaacggcttggcgtcgatgcggagctgagcgggcgaaacgatttgatggcaaacggccggaaaatttcgggaaacgcccagttttcaacgaaagggagaatgttcagccacggcacgctgttgttcgattctgagattgaacatgtcgtatcggctttaaaagtgaaaaaagataaaatcgaatcaaaaggcatcaaatcgatcaggagccgtgtagccaatatcagcgagtttctcgatcagaagatgacaacagtggaattccgaagcatgcttctccgctatatttttgataccgaaggggaaataccggagtataagctgactgaaaaagactggaaaatcatcaatcaaatttcaaaggaacgctatcaaaactgggattggaactatgggaagtctccgaaattcaatcttcagcattcaaaacgttttcaagcgggatcggtcgacatccgcctggaagtgcaaaaaggcgtgatccgcgagtgcaaagtattcggtgactttttcggagtcggcgatgtcagcgacatcgaagaaaagctgacaggcgtacagtatgaaagaaaagcaattgaagaagcccttcaaggcgtggacatcaagcattacttcggcaatattcaaaaagaagaatttttggatcttgtctactaaaaagaaggctgcgatttccgcggccccttttttaacatgagaggaatggaagatatttcccggcagcccttgagtgttttctgttcatttactataatgggaatagattttgattatcacaaaatgaatggtcattcattcattttttaaaggggtgggagaatgaatttagtttcaaaattaggggaaacagctcaatcaaagcctgacagaaccgcttatatttttggagagcaaacggaaacatacgggggattgcagcagaaaattgattgctttgccgaagggctgcgcgaaatcggggtggaaaagggagatcatgtcgctttgctactcggcaatacaccgcattttgtgattgcgttttacggcgcgctgaaggccggggctgtcgtcataccgatcaatccggcctatacgccgactgagatcggctatatgctgacaaatggcgatgcaaaagtgatcgtggctctgggacagctgcttccgctttacgaaaaggtgcatgaatcccttccgaaagtcggctgcgtcgtgctttgcgaaactggagagccgcttcaggaaccggaaaacacagaggttaagatgaaattgaaatcgtttacaagcattatgaaacctcctgtccggccgtttcctgaaatcgatgacgaagatacggccgccatcctctatacgtcaggcaccacgggaagaccaaaaggggcgatgctcacacatcaaaatctattttcgaatgcaaatgatacagcccgctatctgacaatgaatgaatctgaccttgtcgtcgccgccctgccgatgttccacgttttttgtttaacggtctgcatgaatgcaccgctcatgaacggcgcagcgattttgatcgtgccgaaattcagtcccgccgaggttttcaagctgattaaaaagcatcaggcgacgatcttctcaggcgttccgacaatgtacaattacctgtaccagtatgaaggagcggatgaaacaggctttcggtccatcaggctttgcatctcaggcggagcggccatgcctgtcgctctcctgaaaagctttgaagaaaggttcggcgtcctcgttttagaaggctacggcttgtcggaggcttctcctgttacatgctttaacccgttcagcaccggccgcaagccaggatcgatcggcacgaacattctcaatgtgaaaaacaaagtcgtcaatgaactcggggaagagctgcctgccggccaagtcggcgagctgatcgttaaagggcctaatgtcatgaaagggtactacaaaatgccggatgagacggcccatacgataaaagacggatggctgtatacaggtgatttggcaaaacgggatgaagacggttatttttatatcgtcgacagaaaaaaagatatgattatcgtcggcggctataatgtctatccgagggaaatcgaagaggtgctctacctccatccaaaaatcgcagaagcggttgtgatcggagtgcccgatccgaatacgggagaagccgttcattgctatgtcgttccgaaggataaaacgctgacagaggaggatgtcttgtcgcactgcaaaaagcatcttgccaaatacaagcgcccgtcggcgatcgttttcatggatgaaattccgaaaaactcgaccggcaaaattttaaggcgcgctttaaaagacattctgacaaacaaatcttgacccgctaaaagggacgcctgccgcgtcccttttttgcaattctcctaggagggcgtctttttccctttgtcggagaacgaaatatgtgccttcctcttctttcaggatgacggcttcatctttcttcagccagacggtgaagtgaacgcgatgtgtgccggtcatgctgatgtatccgtgatacgccggagaaggcaggtgatgcgctgtctttttcttcattcttttccctttattaaatgtatcaagcaggacggctatgttgtgcctgtctttgatgctgaccgttttttcactgtctcccgcctgcttcaagatgatttcttctgcatttcttgagtcgaaaggctccgccatcaagtggaatacataaaagacagtgatggataaaatgccgaaaaaaagtgcgatccccattatttttttcagaatgatcaccccaggctatctattttctccctttaaagccttttcatcctgagaaattatgctataatgttcaataaattatacgaatgtttaatttattataagggggcggaagatgaattcgattgaaaaacaagtcgcagaaaacataaagaggctgcgaaaagtccgcaattacagtcttgatcaattgtcatcgatgactggcgtcagcaaaggcatgctcgcgcaaattgaaaaaggctcttcaagtccgacgatcacaactttgtggaagatcgcaaacgggctgcaagtatcatttacttccttggcagaaaagcctgccggggagccgacggtcgtcagaaagcacgagaaaacgcccgttatggccggagaagaaaaatacgcggcatttccgcattttccgttcgaccagaaaaagaagtttgaaatcttttatattgaacttgcgcccggctgtgtacacgaatcagagcctcaccacggagggattgaagagtatgtgctcgtctctagaggagcgatcgcggtgacggcgtgtgattacacctgcagcctgaacgaaggcgatgcgatgcatttcaccgcaaacaccgtgcatacgtacgaaaacaacacggaacaaacggcatcatgctatacactcatttattatccgtaaagaggtgtcaagatggaaaagcacgattcactcaactttctagacgggcttcgttcaggggtttcccttgccgtcggctacattccggtcgctttgacattcgggcttttggcgaaaacaacggggctgtcgctttttgaaacgtttttgatgagcgcccttgttttcggaggagcgtcccagtatatgtctttaagcatgctcgccgttcagacgggaatcatcgaaatcgttatgacgacgttcattgtgaatatcagacattttttattttcggcgactttgaatcaattggtagaaaaagattcgccttggaaaaaagcgttttactcatttttcgcggtgacagatgaatcgtttgccgtcgctgctctaagaaaggaaaagctaacgaccgggtatatgatcggcctcggttcgatcggatatgtaagctgggttttttggagtgcggccgggcattttgcaggggccgccatgccggccgttctccaggaaagcatgagcatcgccctttatgccatgtttatcggattgttggtgccgcctttgaaaaaacagcgaaaagtcctgctgctggcgggggcggctgcgctattcaatacggttttccaaatgaacggaatattgtcggcaggatggtcgatcgtctgcgctacgcttttatccgccgtcctgattgaatggctgtaccaatttagaacagaggggaagagaaactatgtttagcccgatcatctggatgattatcggcatggctgccgttacatatgtgccgcggatggtgccgctcattgcttttgaaagcctgaagcttcccggatttttggagcgcgtgctgaaaaatgtgccgtacgccgtcttaggggctctcatttttccgggagtttttttggtgcaaagcggtatgctctacggacttgccggcgctcttatcgcatttttattttcctattttggagcaagcgtcatagtcgtcgtgatggggacgattttgacgctcgcaggcgccggcctcttgctctcattgtaaggcttggttctaactttcgcatgaaaagcttacaatagaagtaactgctatgtgagaggaagtgattcgccatgcggaaatggatcgcgggagccggtctcctgtatgtgctgtacggcctttttttctattggtatctctttatggctggtgaaccctccgttcctgaggcgctgaaagggacaagcgcagacccggcggcatttatgaacgaaagagaactcatgctgacggaagagtactcgaaaataaaggactttctgttttttatccggattccgtttgaatggtttttattttttatattgttgattgccggtttatccaggaaaatgaaaaattgggcggagcagacctcgaagaggagaagcattcaaatcacggcatatgtttttgctttgtttctgatcgtcacgatcgtttctttgccgcttgactggatcagctatcaatattcgcttgactacggcatatcaacccagacaaccgcgagctggatcaaagaccaggtgatcgacttctggatcagttttccgataacggctgcggcggtgatcgtcttttactatttgatcaaaaagcatgaaaaacgctggtggttttatgcctggtgcctgacggttccggttacgctgtttttattttttctccagccggttgtcattgatcctttatacaatgacttttatccgctgaaaaataaagagcttgaacaaagcattctgaagctggccgatcaggcggatattcctgcgaatcacgtctatgaagtgaacatgtctgaaaaaacgaatgcgttaaatgcctatgtaacaggaatcggcgccaataaaaggattgtgctctgggataccacgctgaacaagctggatgagccggaaattttattcatcatggcgcacgaaatggggcactatgtgatgaagcatgtttacataggacttggcgggtatctgcttttatcccttgctgtcttttatgtgatcgacaagctgtacaagcggatcatcggccgctatggaagaagccttcatattgcaggaaaatccgatctagccgcacttccgcttcttctgatgctgatgggggtcatctctttcgcgtcgtctccatttacgaacgcagtttcgaggcatcaggaaaaagctgctgaccagtatgcgattgaactgacgcaaaacagcgatgcagcggtttcgacgtttcaagagctctcaaaagccgggctgagcgaggcaaacccgccgtttctcgtcaagatttttaaatacggccatccgacgatcatggaacggattcaaaatattgaacaaccttcatcagaatgaagaaaaagctagtgctaaaaacactagctttttctatatgctatttgttagaatatgttattgagcggcagcttcgacattgatcagacctttcccatagtagaaggagcttcccaaataagtcgccgtgctggagagacggttgcggacttgtgaagctgaaaggttcggatgttttgacaagatcaaagctgctgctcccgctacatgaggagaagccattgacgttccgttcaatgttgcataagtgttcgttgggtaagtgctgtatacgcctgcgccaggagccatgacttcaagctctgctccgacgctggaaaatgaagctctgttgctgttagagtctaccgcaccaacagcgatgacagaatcgtatttcgcaggatagccaattgtattcgtgtttcctgaagatccgctgttccctgctgcagctacaacgacaacccctcttgcatatgcattgactttaaccgcgtacaaggatacgcttggcgcaacgcctaatacacccgttgtattgtcaagcgcagctactgtaccggcaacatgtgtgccgtgtccgttgccgtcggtgttataagcttcgccagccacaaagcttgctccgccgactacgttcaagtccggatgagaagcttggattcctgtatccaggacggctacttttacattcgctcccttaaagccttgagcctgcactttgtccgctttaatgagaggaatgccgtaaggaacggtttgcgccaaggcatgggccacatgatcctcttccacataagcgacatccggatcatttttgacttccttaagcgcttctttgtctagcttcgcttttgccgcgttgatgattctaaactgcttgtccacttttccgccgctctctttgatgatgtcctttttgacagatgcggttttcactcctgacttaaatccgacaatataatccttttcaacatttttcgccggttgagcagcagaagcggaatcgctgaatgccatcgtgaacacgagcatgaaggccgtcagcatcccaagccaaaaactctttttcctcatcattactcactctcctcctctttattcagaataatttaaatagaaggataatataatctattccaattattctgttaatttattatagaaaaaaaatgaattatatggtaggcctatttttttggaggaccaatttaaaattttttggttattaataactgttttagaaaaatgttcagttcgaaagtatgaatagaccgcttcagcctggcagggaaagaggtcccgagggccgcgaatgacaggagattgctccatctgattcattttatgaaaatactattcatttattttatgagatcattttttgccgaaggaggttgcggccttgtcgatcatctattaaaatatgcaatatatcgcatacagaaacgggtgaaagatatgaaatcagctcatgtgaaaggcgtattgatggtgcttgcaggggcttcattgtggggattatcgggaagcgctgcacagtacatatttgaaaggggagcggttgaagccggctcgcttgtctctgtcaggcttctggcatcgggagtcattctcttgttatatgtttcaatgaaaaacggttttcaacatgtgtgtcagatatggaagaaaaaaacagatatttgttcgattttagtattttccatttttggaatgcttactgttcaatatacgttttttgcttcaatcgaaaagggaaatgccgcggctgctgcaattcttcaatacttggcgccttttttcgtattgttttacctatatgttaaaaaagaacttccgcctaagtggaaagatgccgtacttactttattggcgcttttcggcgtgtttcttcttttgacaggcggaaggccggacagtttgtatattccggccgaggccgccgtttggggcattttgtccggtggagcgcttgctttctatacggtttttgcaggaggattaattcaatcgttcggtgctttgacggttacgggatggggtatgctcgtcggaggggccggaatttcttttttgtttccgccgtttcggtttgacctttcgcacattggggcaggggaggcggcagccattctgtttgttgtattgtgcggcacagctttggcgtttgccctatacatcggcagcctttcttatctttccgcaaaagaaacgagctgcctgagctgcgccgaaccgcttgcggccgttctgtcgtcggcgctctggctgggtgtgcccttcaatgcctttcaaggagccggtacggtgatggtgatcattacggtcatcatcctttccctcagcagagaaagaaaagcagcagattctgtcaatgaaagggtgtagaaaggagagggaggctcctttctttttaaaatgataatgattatcattgtcattgatggagggagttgctataataagctcgtctactacaaaaaaggagatatatatgaagcacaaatattttgctattttatttttattgatgatatcagtgatgacggcctgctctggaggaagcgagagcacgaaaacttccggtcaggattccgtgacagttaagcatgatcttggagaaacgaaagtgcggaataaaccgaaaaaagttgtggttcttgaattgggatttattgatgcgctccttgatgcgggtattaagcctgtcggaattgcggacgacggcaaacctaagtttattaacgagaaggtcaggggaaaaatcaaagggtatacttcagtcggttcgcgcgcccagccaagctttgaaaaaattgcttctttaaagcccgatttaattattgccgattcgagcaggcacagcggcgtctatgataagctgtcgaaaattgcgccgacaatcgcgctcaaaaacttgaatgccgattatcaggacacgcttgatgcatctcttacgattgcgaaagccgtcggcaaagaaagcgcaatggagaaaaaattggctgaacataaacaaaagctggatgaattgaaacagaaattcggcagccggaaacagagcattcttctgctcgggaacacaaatgaagaaatcaccgtgcgcgatgaaaactttttcacgtctcagcttctgacgaaaatcggctatacatacggtgtcggagacagcggcaaaggcgatgccgaaaacggtgaatccgtcaatattaaaatgacgctcgaacagctgcttgagaaagatcccgacgttattgtcctgatgacgggagaaaaagataaagtcgatgaagacgggaaaagaccgatcgaaaaagatcctctttggaaaaagctcagcgcagtcaaaaacggcaaggtttatgaagccgacagattcgcctggtcgctccgacgcagcattgacggagcagatgagctgatggatgaaatcgatcagcatcttctgtctgaggatcaaaagaaatcttaggagcctgccggcttgttggacgggatgacgcatgcttttgtaaaaaagcatgcgcttgttttttctaaaggagtgacctgttttgatatatatgaaacgttttgcaccgctcatttttgtttttcttttgcttgcgagttttgcgctttctgtttcaatcggttcgtcaatgattgcactgtccgatatttgggcggctgtttttgcgtacgacggttcaaaattgcacgcgattattcagtccatccgaattccgcgcgcattgaccgccgcattaatcggcgcgaatctaggggctgcgggcgcgctgatgcaggcggtgacaagaaatgcgctcgcatctccgagcatcttcggaatcaatgcaggggcctcgcttgctgtcgtatgtttgacggtgatgtttcctgcgcttgcagctccccagacagcgatgggagccgcatttgccggcggtgcagcggccgcgctgatcgtgtacgcggttgcctcagtattcagcgaacatgacagggatatcagctttgccttgattggcgttgtcattcaggcgattcttgcttcgatgacgcaaatgctgcttatctttcatgaagagtcgacggaaacgctattgttttggctttccggttctttagcggggagctcatgggataagcttcatttattggttccggtgagcattgcgggtttgttgacggctttggccttagggagggcggcttccgtcatgagtctcggagatgaagtttctcatgggctgggacaaaaagtatggctcagcagattgctaatcgccttcactgttgtcgcattggcgggagtgtccgtttccgccgccggtccgattggtttcatcggtttgatggttcctcatatgatccggtatctcatcggtgctgactaccgggcggtgattccgtattcggcattgcttggagccgttcttttgctgtttgccgatattttgtcccgctttgtctattttccgtaccaaacgcctgtcggagttgtcacggcaatgattgggacgccgttttttatctatttggcgagaagacggaaaaagggggcggcataatgaacaatccggcaagaaagacgaaaaggcggcgcggacaatcggcggttgttctctgtgcgctattcgcctgtttgtttgtgctcattgtactcaatttggcgatcggcgatgaaaacatcggactgtgggacgtattgaaatcgctggcaggacaaggcgatgcgggagtccgctttttggtgatggaatttcgaatgccgcgaatcctcctcgctgtgcttgccggaggggcgctttcgatcgcgggtgtagtcgctcaatttctgatgaaaaatccgctggccgcccctgacacgcttgggattacaggaggagcgggattgggcgctgtgatcgttacggtcttgttttcacagcaaagtccgcttctgctgacaggcgccgccttttcaggaagcgttttagctgcgatcctcgtctatttattggcttatcgaaatgggatctctcctgtgcggctggctcttgtcgggatagcggtcaatgctttctgccattcgggcattcagctgttaatctcaagggggagcccgaatgtcaacagcgcattaatttggctgaacggaagtctgtggggaagaggctggcaggatgtattgcctcttttcatatggtgctgtctggtgattcctccgatatggcttgcggcaaaaccgctcgatatcatcaaatcaggggacgggattgccgtcggcctcggcatccggcttgaaagaacaaggtttctgctgcttgccggtgcggttttgctgacagctgctgctgtgaccgctgtgggaacgatcggttttatcgggctgatggcgcctcatatcgcaagaaagctcgcaggggctgaaacgaagatcttgattcccgttgcagctctcgtcggcggcatcgtccttttgatagccgatgccgccggaagaggtcttgttccgccgcttgaaataccggccggattgatcgcagccgttatcggcgggccgtattttatctatttgctgcgccgcgaagaacataaaaaaagacggcatgcttgatgccgtctttttttaatctgacaaatggtgtgaaaggttgtaatccttcacatgccatttattttcatgaaatttgatgttgcttaggcaggcattgacgagcttcgtgttttccaggttgatgtcgccgtttgagatttttgacagaagcgcgtgtatcgcggctccgtgtgcgacgatcagcacttttttgtccggataccgctcactgaccttttgaacgccggccatcagccgttcggcaagcgcttcttttgattcctgattcggatattctttatcaggatagagcctcattctttcttcgaatggcattccttctgcatctccgtaattcctctcgatgaaatcctccatttcgatgatttcaagtccgaggtattgattgatgatttcagcggtttctttcgctcttcttaaagggcttgtaatgatgacgtcccagtcggaccctttcaaaaacgccccggtttcttttgcttgttttttaccggtttcatttaaagggatatctgttcttccctgcagttttcctaaagcattccagtccgtctcgccgtgccggatcaaacaaatcgcagtcatgctaaaagtctcctttcgaacttggggtgcgcattttcggtgatatggccattatactaaatttaaaaaacggaaccacgaaatatgactggcaccgaacaacatttacatgattttttcaaacaggctgtgccgattctgctgttttttcgatcacgtctgcaatcgttgtcgagcgttgccgtgatggctgtgaatatatatctttgcttgcacggcagacttctcaaagtatggatgtgaaaaaatacacaggtcatgattgacctgtgtacggtaacgcctcatttttttgtcagctctacgagagaatcgactgaaactgcgacttgtgatacggcggcattgacatcttgaaggccgcttaaaaacgactgcaggtcgccttcgattcggccgctttgctctttgctcgttttcatattggagacgatatcatcgaataggcgattgatctccgacatcttgtctttgctttcgttcacaagctgatttacatctgtaatatgcttcgtgacgatcgagatttgagcgtttgtgttattgacgagctctgatacggtggagacggtttttttcgtatcatcggacagctttctgacttcgtttgcgacaactgcgaaacctttgccgtgctctcctgcccttgccgattcgatcgaggcgttgagcgaaagcaaattcgtctgttcggcaatgcctgttacgatgccgaatatcttttcgatctgcagcgcgatttcttccagctttttaatttcctgctcgatttgcgtcatgctgcttcccatttgattcagctgctgttcctgttcctcaagctccttttttccgccgatcgatttttgttcgacagaaacggctgtcttcgttccggctcttgacgtttcggcgatctcggaagatttgtcgaccaattcctgtacggcgcccgtcgtttcggcaaatatagcggccaaagaaccggaagtatctttaatttgcctgtgaagttcatttttgctttcttcatcaagtctgcggagcctcgcgtgttcgtcttcaaaggcctccaggacgatctgctgttcgatgttgagaattttggtgacggctttgacagaccgcctgtattcctcatcggataaggcgttttcaaagatcttcagcattgaaagaaggagatcttgaaatgcccccagataccactttggcaacagtccgatgcgaagatgaacgtgggcgatccggattcttttttctaaaaaggcttcgtcgatgacgcctgaaaacatttcctggatgtggatcgtcaatgtctttttgagacggtcgaccgagctgttgtcatggatgatctccatgagagagctttcatgctcaagattttgataaaatcgggtgacgatggtttcaatatgttcagtgactaagggcttcagcctgctcagcacccaaagatcctcatccgtcaaatcgaccattgccagctgttttttaaattctgcgtgctgattgagcctgattctttttgtttggtcagggctttccccagcaaaaaatgatcgttctgtctttctatcctttttgaataacacgatcgtatccccctgtaatcattaatgataaaactgccgtttttttgaaatttccagcatttatctttttatcggcaatttttcattactttttaacttgtacatctcagctttctggatctttaagaggttctacggcagggccctcaatgacatcgccgtcgatcgaaaaccttgagccgtggcacggacagtcccatgtcttttctccatcattccactcgacttcacagcccatatgggtgcatgttgtgtcaaccagatgaagctcgcctttttcatcgcgataagcgcccgcccgtttcccggcatgcgacacgaccgcgccttctccgttgacaaggtcttccggcttcctgatcggctgctcgagttttccttcggcaaagtgttttgcaacatccgcgttgtaggaaatcgcttttttgatgcttggatccgggtggaaacgggccggctgaaagacggcttgataaggattgtcttcacccgcgatatgatctgtcatcagctgcgcggcgagggtgctcgttgtcatgccccatttccgatatccggtggcgacgagaatgcgcttttctttcggatagatcggcccgatatacggaattttgtcaagcgtgattaaatcttgcgctgaccagcggtaagggatcgattcgatgccgagcacgccttccgcaaatgattcaagcgcctgataatgcttgattgtatcttctccctggccggttttgtggctttcaccgccgacaagaaccattttttctccgtcgatcgtcaccgagcgaagcgagcgtgaaggctggtctatacttaagtacatgccgcctggatacggcgttttcggcttgacggcgagcacgtatgaccggctcggctcaagccttgcaaaatagaatccttttttatcatgaaatggaaagtgcgtgcagcacgtgacataatcgctgaagatttgatgtccgcttcttgtcagcacttttggccggtcgccttctttgatttccttagacgccgtgttttcgtatatttttccgccggcttcccggacggcctctgcaaggtatttcaaatagtgcagcggatgaaactgggcctggtttttcatgacgagtcctgcttttacatcaattgggacggggagatctttgatgaattccctgtcaatcccgagcttttggtatgcttcatattcctttctgagtttttggaccgattgttcttcagttgtgtaaatgcacgcgtcctgttcttcaaaatcgcacggtatcttttgctcaagcacgaggtttttgataaaggacagcgccttgagatttgcttcataatacagcctcgcattcggcattccgatatgcccgatcagttcgtcatagatcagatcgtgctgcgcggtgattttggctgtcgtatagccggttgttccgtcgagtatccgtccggattcgatcaagacgacgctgtagccttttttcgtcagcaaataagccgtcgtcagtccggtcatgccgccgccgatgatggcgacatctgttttgacatcttcagacagttcctcgaacgaaggaaggtctgtactgtttctccaatacgattcaggcgagtccggcagtttttgttcttgattgctcacaaagttccctccatcatgcatccgttttgttcttaaattttcccaattgagaaatattcatgcatgtgaatcggcttgtcataaaaaaggggcgttttcataaaatagtaaggttgaatcgatgtgaaggaggaatggttttgagcaagcagccgaagaaagtactgcctccccagcaccaaacacagcgtcccggattggagtatttgatggatccccggcccgttttcgaccggccgaaacgagagcgaaaactggctgggaaaaccgcgattattacgggaggagacagcggaatcggccgtgccgtgtccgttttgtttgcgaaggaaggcgcgaacgttgtcatcgtttacttaaatgaacaccgcgatgcagaagaaacaaaggggtatgtggaaaaagaaggcgtcggatgcaagctgattgcaggggacatcggggacgaggctttttgcaacgatgtggtgcgccgggcaaaggaagcattcccaacgatcgatattctcgtcaataatgcggctgaacagcatccgcaaaagggaatcgaaaaaatcacgagccatcagctgatccgaacgtttcagacgaatattttttccatgttttatttgacaaaagctgtgctgccgcatttgaaaaaaggcagctcaatcatcaatacgacctcgattacggcttatgccggcaatgaaaggctgatcgattattcttcgacgaaaggagcgattacatcatttacgcgttcgctcgctttgtcgcttgtcgatcagggcattcgtgtgaacggtgtggcaccggggccgatttggacgccgcttataccgtcgacgtttactgagagagaggtcgaaatattcggttcaacaacgccgatggaacggccgggacagcctgctgaagtggcgccgagctatctgtttctagccagcgacgattcttcctacatgacgggccaggtgctccatgtcaacggcggaacgattattaacggataaaaggccggactatttaaaaagccggcttttttcgcataagaaagccaatcccttgggattggccgttatgcgtgctttttcagcgctgtatattctcttgaaagctcaaggaaagattgcttatctcctttgtctaatgcttcattaatcttcttgctcagcgtgtgcaaacgccgtttaaaaagcgattcatcaaggaccatttgaatgtagatatccgtgatggttacatcaagttctttcaccttttgggtattgcgggacttcatgagctcagcgtacgactttttctctttcataaagattccccctgatgccttttttatagtatatggattacacaataaaaaatcaataagtatttataatttttagaaaattattcggagatgcgtgtttatgagaataaaagtttgtatatttggacaaagaaacacggatttaatcgaacaaaacataaaaatggcattttaaaaacatattttcaaattaattggaaaaaatcctgtcgttttgtaaaggataatgttagattaatagtataaatttactaacgattaggaggatcaaaatgagcacagaggatatgacaaaggatacgtatgaagtaaacagttcgacaatggctgtcctgcctctgggagagggggagaaacccgcctcaaaaatacttgagaccgacaggactttccgcgtcaatatgaagccgtttcaaattatcgaaagaagctgccgctatttcggatcgagctatgcgggaagaaaagcgggcacatatgaagtcattaaagtttcccataaaccgccgatcatggtggatcactcaaacaacatttttcttttccccacattttcctcaactcgtcctcagtgcgggtggctttcccatgcgcatgttcacgagttttgcgcggcaaagtatgacaacacgtttgtcacgtttgtcaacggggaaacgctggagctgcccgtatccatctcatctttcgaaaaccaggtttaccgaacggcatggctgagaacaaaatttatcgacaggattgaaggaaaccccatgcagaagaaacaggaatttatgctctatccgaaagaagaccagaatcagctgatatacgaattcatcctcagggagctgaaaaagcgctattgatctggagcggctttgaataaatagtgctcaagaagcgcggatacctggttgcggatgcggggattaaagtagttatgctcttcttcgtaaccctcatatataaaggaatacatcgtaaaggcttcgtcccgcgacacttcatgcaccttgattttccggcggcgcagttcattttttacgtcgtacaggtcgcgctgggcaagctttaacgcctgttcgatcaggatgcagataggggtctttccagcttaaacggcccctgctggatgattttcatgtcccggtttaatatgctgacggtcatcgggaggtaaatcgccttttcaatcatatccctggcttcggcgggaattcttgtcatggcttttctcctcatttctttttttgttcaggaacatttgttctgtttttattttacacgaaatacggccttttaatcaagaacgggaaaaaatgactaaaatgatcaggttgtttcagactaatacagaaaacaaccgagacggatgatttaaagtttttgatttaaagtgtagaatagaagtagacaaccgccctgaggagaatcaatgttggagcaattattcagctattttacagaagagaatttaacagagttttttcagagctacagggcttttggtccttttgtagccgtactgctgccgtttattgaagcgctgctcccgtttttgcccctgctcgtgtttgttgttgccaatgtaaattcgttcggtttatggcaggggtttttgttgacgtgggtcggggcatctttaggttctatagcggtttttctttttatccgccatttcggccagcaaaaagcactcggttttatccgcaggcatccatccgtaaaaaaactgatgatctgggtggaaaaacggggcttcggtccgctgtttctcctgctttgctttccattcacgccttcggcggcggtaaatgttgtggcaggactttcgcgagtcagcctgctgcctttttcattggcggtgctttgcggcaagttcgtgatgatttttatggtgagctttgtcggccatgatctgaaggcgctttttacccagcctttgcggacagccgccgtgatcatcgtcatgctgatcttatggtacgccggaaaacgggttgaacatcgtctgaacgtgagattcagccagagagagaaagactagggggacacagaattgaaaaagcgttttttggtcatagccggggtactgcttgtcatcgtcgtcgggattcaggtcaaaaatgccgttttcattgaatataaagtagaaggcgtcagcatgaatccgacctttcaggagggcaacgagcttttgatcaacaggttcgcccaccgctttaaaacgatcagccgatttgacatcgtgctgtttaaaggacctgacaaagatatattcattaaaagggtgatcgggcttccgggcgaaaccctcaggtatgaagatgatcagctgtatatcaacgaagaaaagatcaaagagccttatctggacgacttaaaggccgtcaccgccggaggggacttgacaggggattttacactgcaggaagtgaccggagaggagaaggtgcctgaaaacgagtacttcgtcctcggggacaaccggatccacagctttgacagccgccatttcggctttgtttcagaacgggacatcgtcgggattgtgacggaaagaattgataagaagtgattggagagtacgggggagagtaagcggccgaccaaggaatacgattacgcaaatgacgagcccgaaatgtcaattagtacaacagcatcaataatgacgcatttgctaaatatgaaaattaaaaggcccggatgattccgggcttttttccgtactacttcagcttaatggcattgatccgtttttgcagcttcgttttttcggcggatgctttcagcttgcctactgctgattgcgctgctgattttgtttttttcgttctcttttgttcggccgttttgactttggcctttgctgcagaaacttttttattataggctgcagctgcttgctttttcgcggtgttcagccttttttgcagatttgatttgtcttttccggcgggaagctcattgatcgctttttgcgctttgccgaggtttgagtctgttgccgctttttcagctttggcaacggcctgctttgcggtcttcaagaggcttgaacggaccgcgttgatccgtttttgcaaattcgttttgaaagtgccgctgtcgagttcgttgaccgctttttgggcggagtcggcattggttttctttttttgcttctcagcgagtttcactttgctttcggctgtttttttaagctgctctttaacagtattgagtctctttttcaaagcggttttatctgcgtctgcagggagcggttcgatcgctttttgtgcggtttgaatgtccgcttttttctttgtcttttccgcttgtccgacggctttttgcgctttttccaatggctgtgtgacctctttgaagcggattaatccgtagccgaacaaatgatcacggccgggagcgcccaaatcgcttgtataaaactgcattttcttgcgcagctcagcatttgaagcggttgggtacagctgtttcaaaagtgcaaacatgccggtgacgtgcggcgttgcctgtgaagtgccgcttccgattgcatagccgcgatcggaagatgtactgataatcgatgtgccgggagcggaaaactcgacggcgctgccggtgttggaaaatgaggcgatctgatttttttcattggttgccgagacggcaatgacgctgctgtaggcggccgggtaataaacggattttccgtttccggcatttccgctcgctccgactaaaatgattccccgtttgtatgctttatctactgcatcgtggagaacttgactgtcgcctgaaacgacgaggctcatattgatgatatcgattccgtgctggatcgaccaatcgatgccttgtaagatacctttcagatcccccgcaccattccggtccagcgcttttacggcatacagctgcgcgccgggcgcgatgccgtcgatcccccgtccgttatgcttcgctccgatgattccggcaacatgggttccgtggccattatcgtcacggtatgaagcggtatagccgaccatcgatgcaccgccggcgatcgacagctcctcatggggggaaatcccgctgtcaataaccgcgatcttcacctgttttccggtcaaacctttattccaagccagtgcggcttgaatcagcttgatgttccactgtgaaaacgcggaggcgttttgcgctgtgctgctggagaaagcttttagagcggtgctgtcggcagcagctaccgggaggttgtcttcgacatacaggacgtcgggatcgtgttcaagttcgcgcactgttttgtcgtccgcagtgacagcggctgcgggaatgtgccggtaaacgtgttctaccgtgtctgcctgttcgatgacggtttcttttccgctggtatttttatatacaacaatgacctcgttttcctgcttattgctttccgcttgaatgcggggtgaatttgcgaaaaaaccgacgaacattgcagccgaaaccgcgattttccataactttttcatccggctctcctccttttttagcggcgttcgctatatatatcggaggatttttgaattttcaaagagaaagaaagcttatcttaaggtcgcttgtcatgcacctttagtttttaaaacgttaaaaacactgttatatcaacatttgtgaagcttcctgtttattcgggaagttaaattgggtactccaagttagttttaaaaaagagtcataaggccagcttctatcgatgaatcatttttaagcgacgccttttgtctaaaatgtataatgttacttttgtttttgttgaaagtgaacaatgttattgactggcttacaacctacaatttaattaaataaaaaatagattaaaagaagggagcgttctcataccgtggaaaaaacaattaaacatgaccccaattattacaaaaagataattattgcattgtgtttagggtgggtcgctatttggatttatcgtacaatacttacgccaatatatccgcagattcaagaatcattagggaatattagtgaccgcaaatagggttggttgcttctatttatttctttgcatatacgggtatgcaaattccatcaggagcacttgtcgataaatttggacaaaaaaaggtgttaattcctgcatttatcgtttttgcgctggctacatttgtgattggcacaagttcaactatcatgcaagtatacattggttcgttattggctggtatttcgactggttcatattacggtgcagccttttccttatcagctaaacatacgccaaaagataaaaaaagcttttccaatgcgattataaatagcggttcagcattagggatggtaattggactaatcggatcatcggttttagtaggcggttttgaaattcaatggaattatatgctttttataacagctatcgttatcgtagctgtaacatttgtgtttgtgctgtttattaaacaagataaaacatcagataaggaagtggctgaagagaagaaagacactgtacaaagcacagatattcaaaatgaaagcttattttctccaagacaattagttgtatattttgtatattttgcaacatgctatggctattatatgattgtaacttggttgccgtcctttcttgtagcagaaaaaggatttgctcaaggttcagtaggatatgtagctgcactagttgcggtcactgcagtgcctggtgctttgatatttactaaatatatagacaaaaatgcacatttgcgtctgcgtttaattttatttttattaattgcagcagcagtaacaattagtttgacagtgtttgcaccaaatcctgcagtactgtatattgcgttaattttatatggcttattaggtaaacttgcgattgatccagttttaataacctatgtatctgattccgtatcaggagacagagttgccagagcattaactctctttaacttctttggaatgagttcatctgttattgcaccaacacttactggttatattggtgatgtaaccggctcgcgagtattagcattctatattgcaaccattcttcttgcagcagcagcgttgctatttttccttgtggttatgttaagacagaataaaacagcagctaactaagagaacttccagtggttctccttttgatttacaacgatattttctctgaagcaaataatgccaatcgaatgctcagggatgtatcaggagattctacagattgacctaatatttcttcgcattttttaatacgatatttcacagtattacggtgaataaaaatatcttctgaggtttttgtaagatcacattggtttgccatatagacacttaatgtgaatcttagttctttttccttcgttgtctgaggataggctaaaggaccgagtgtataaatgataaatggctttaatttattcgttggaatgagttgtaataattcttctacgcttttggatttgtagggctctataaattccatttcgccttgttcatatttattatcataagcctcattcgcttcgaaaaaagacagtggcaattgtgaaagctcggaaacctcattaccaatgccaaatgaaagggagctattaaaaaatagctgtattctgactcttggcatatcattttaaactaccctataaatcaatgttttttattgatttatagggtagtttttttatttgcaccttatttattaatgggtaggagagatgtgtcgctcccatctataaatttttaagcgagcgatctgtgattttctttaggagaaattcgatgcaaatttaatttgttattttttgagtttttatgtaatcgaaagccaacagattctttttatctctggcattagcccattatttagataccgtaaattgattaaaaggtgtctttgttaaaagtgcataaaatgcttttctattattgttggttatgtcaatgaatggtcgtaaacagggttctatgatgaaagtaaatagagaaaggaggagaaaaaaatagatattcgatcaacctttgaaacgttggataagaaattcacaagttttggcggtttagaacaagggggtattacgcgtctgttatactctcctgaatggattgctgcagttcgcgaactggaagcgacattcaaggaagaaggtttagaagtaagctttgatgatgttggaaacttatctggtcgccttgttggaagtaagtatcctgaagaaactattttaacaggatcacatatcgatacagttgtagaaggcggtcatctggatggacaattcggtatcttatctgcattggttgctgtgaaatatttaaaagaaaaacatggtcaaccattacgaacaatagaagtactatctctcgcagaagaagaaggaagccgattcccatatacattttggggaagtaaaaacttctttaacttagccaaaaaatcggatgttgaaacaatagaagatgctgatggaattaaatttgaagatgcaatgcacgaatcgggttttgattaccgtaaaacagatcatgttcgtgacgatattaaagcatttgttgaagtacatatcgaacaagggaaagtattagaggcggaaaataaagcgataggtgttgtaactgggattgttggccaaaaacgttacacaattaacttgaaaggtgaagcaaatcacgctggcacgacaccgatgtcattacgaagggatacagttgttgcatatagtgaaattgtaacagacttaacgaaacgagctagagaaattggggagcctcttgtattaacgtttggacatgtcactcctgttccaaacacggtaaatgtcgtccctggagaaattactttttcgatagactgtcgtcatattgatcaacaactattaaataattttgcgaaagaaattgaagataaagttaaagcggttgcagaaacaaacaacatgacttatgacattaatttatggatggatgaagcaccgtcattgatggataaagaaatcattcaaataattgaacaagcagctaaggccaatgtgggggacagctataaattgatgccatctggtgcaggtcatgatgcgcaaatttttgcggattttgtcccaacagcaatgctgtttgtaccttctattggcggaattagccacaataccaatgaagaaacgaagatagaagaccttgtgaaggggattgaagtattgaaagatgtattgtttgaactagcttataaggaataataatgaaaaggagccagatactcatgagttacttaaatcataatcaaggatacagagaaggtttattagaaacacgttcagtaataaaaaaggataattatgcggtaatcacacctgatggcttggttaataatgttgtacctggctttgaagattgtgatgtaacgattttaggatccccgcgtttaggtgcaaggtttgtagattatttggtaacagttaaaaacaagggcggaaacaaaacaggttttgccggtgatggtatccaatcatttgtgtacgttgaatatggtaaaatcaacgcttttgcggatggtgaaaaatacgaattagcaaaaggcggattcttatatgtgcctccacacttacaattgacatttgaaaataataataatggtgaggacagccgtttgtttttatacaaaaagcgctatcagccgcttgaaggacatacaccagaaatcgttgcaggtaatgtgaataacattaaacaagaagcctatgaaggtatgaaagaagtattaattcaagatttactgccaaaagaaatcgcatatgacatgaacattcatattctttcattcgagccaggtgcttcgcatggttacattgaaacgcacgttcaagaacacggtgcctatatattaagtggacgaggtgtttacaacttggacaacgagtggatgccagttgacaaaggtgactatatttttatgggagcttatacgccgcaagcaacctatgcaattggtttggatgaaccattctcgtatatttattctaaggatgcgaatagagatattaatctataaagaggggcaattttaatgagtgaaccattagtgtatgtagaacgtaatcgtctccggcagctaatgaaagataaattagtgaaagcaggtttacctgaagaacaagcggataaaacagctgatttactcatttttgcagatgaacgaggtgttcactcacatggtgcagtaagaatgcaatactattccgaacgtgcattaaaaggtggatataacctgaaaccaaacttaagcttcgaaaaaacgggccctgcatcggggatttatcacggagataatgcattagggcattatgtgagttatcaagcaatgaaaaaggcaatcgaattagcaaaaacatcagggatcggtgttgtcggtgttaaagaaatgggacacagcggtgctattggttattatgcacatcaagcagcattagaaggtatggcggcattaacagtatgtcaatctgatcccatggtcgtgccatttggcggcaccgaaccatactttggcaccaacccaattgcttttagtgcgcctagaaaagacggtagtccaatcctttttgatatggcaacaacggtacaagcctgggggaaaatcttagatgcaagaagtaaaaacaaatctatcccagactcatgggcagtggataaaaatggagcgccagcaacagacccgtttaaggtaaatgcattattaccaatggctgggcctaaaggatacgggttagcgatgatggttgatattttatcggggagtttgctcggcttgacatttggcaagcatgtcacttctatgtataaagatttatcggagtaccgtcgattagggcagcttcatctcgtaatcaatcctgaatactttggtgggaaggagcaattcctggaaaaaatatctcaaatggttgaagaattacatgacaacccacctgctgaaggatttaacaaagtgtattatcccggtgaaattcaaatagatgtgatgaaacagtataaaaaaacaggtatcccagttacaaaggaaattttagattatttagagtcagacaaaatttactaatcatgtaatgaagggggaagcagatgcgcgtatctaagcaggagctgtttcatttaatcaaacagaagctgatcaaagctggattaaacgaaggagccgcacacgatgtttcagatgtattgacattcgccgatcatagagggatccattcccatggtgcagtacgtgtggaatactatgccgaacgaatcgcaaaaggcggtattacagcaaacccaaactacacatttgaacaaacaggacctgcatccgccgtctttagcggagataatggcccaggtcaccaagcagcaaaacaagcgatggaaaaagcaatcgaaatggcaaaaaattcaggtgttgctgttgtaggcatgaagaatatttcgcatagtggtgcattgggttactttgttgaaatggcagcagaacaggacatggttgctttaagcatgtgccaatcagatccaatggtcgtaccgtttggaggaacagaaccatactttggcaccaatccaattgcttttagcgcaccatcggctgatgaacgcatgatcacatttgatatggcgacaactgttcaggcatggggaaaagtattggatgcaagaagtaaaaatgaatcgatcccggaaacatgggcagtagatgcagccggtgcaccaacaacgaatgcaagagatgtccatgcacttgtgccaattgccggtccaaaaggttatggattgatgatgatggtggatgtcttatcaggcagccttcttggagtacctcatggcgtacatgtatcttccatgtatcaagacctgacaaaaggccgagatttagggcaaattcatattgtgatcaaccctgcatacttcacagatttaactgcttttaaacaacagatttcgacgatgcttgatgaattaaaagcacaaccggcagcagaaggctatggggaaatttattatccgggtgagcgcggtaaattaagaagtgcaaaatatgataaagaaggaattgaaattgtagacgatatttataactacctcgtttcaggcgatgttcattacaatcgttatcatggaaagaatagatttgcagaataacaaaatggaggatcattatgttatacacaattataaaagaaaacacctatcaagattctatcgtgttaatgcttttatcaaacaagttatctgcaatagatggtgtaaacaaagtatcgatcatgatgggaacaccagctaacaaagatatttttaaatcttcgggtttgggcacagatgaattggaaaaagcaaaaccaaatgacatcgttatcgttatagatacaaatcaagaagaaaaagtgtcggaagtgaaagaagaagtagaagcagctttaaaaggtgattccgcttcacaagacacatctaaagaccaagaagcacataattggaagcgtgcaatggagcttgcgaacaaccctaatttggcattgatctccattcctggtcagtatgcagcaatggaagcggaaaatgcattgaatgaagggttacatgtatttgtattcagcgacaatgtatctaaagaagatgaggttaagttgaaacaaaaggcgcatgaaaaaggattattagtaatgggaccagactgcggtactggaattattcacggcgtgccactggcatttacaaatatcgtgaataaaggagatattggcgttgtgggtgcatcaggtacagggattcaggaagtgacatgcatcattgaccgtcttggtaaaggtgtaacaaacgcaattggtacaggtggtcgggatttatcaacagaggttggtgctaccacggttttagatagtatcaaagcattaaatcaagatccacaagtaaaagtgattacagtaatttctaaaccacctgcaaaggaagtgcagcaaaaagtattaaatgtgttaagaaatattgaaaaaccggttgttacgttatttttaggagataaaccaacttatcaggaagaaaatatttatcatgcgtatacacttgaagaagcagcggttgtatctgttcaattatccaatggcgacaaaccgaattttaaaccgacagtggctgaaaatgtaaacgtgtcgttaaaagattcacaagttggtattaaaggttattactcgggcggcaccttggcatctgaagcagctgtgttagtgaaagaggcattcaaagaagaagtacctgaagagaagaaaggtgcctatattctaaaaacaaaacatcatgaaattattgacttaggcgatgatatttatacccaggggaagccacacccgatgattgatcctgaaaaacgcatcgaaatgcttgaaacatctggaaacgatcctgaaacagcagtcatcatgattgataacgtcattggctatggcagtcatgatgatatggcaaatgaattagcaccagccattaaacgtattttagccaatgcacatcaggatggccgtgaacttgcagtgcttgtaacagttgtaggtacagataaagatcctcaaggttacgaaaagcaaattgaaaccttaaaagaaagtggtgcaatgatttgtgagacaaacgaccaaatggttcgtacagcgattaaactggcaggaggaaaagtggaacagccagtccttgacatacaaaaatttgaatatacccaagaagacttgacagtagacgaaaaaattatgtccttaatcaatacgaaaccaagtgtcatcaatattgggctgaaaagttttacagcagctgttcagaagagcggatcagagtgtgttcaatttaactggcggccaattgctggcggtgatgaaaagctaatgaaagtgcttcaatatctaaactactatgaaggagagacaatctaatggggtacaaaacaataaatgaagcgaacgaagctgttatccggaagatcatagcagctgaaccattcttgaccgatgttgtacctgccaagtctgtgattcctgaattagaagattatgtgttattacatgctgggcctccaattaaatatgaaaatatgacagatcctatgcaaggctcttgtgttggagcgattctttttgaaggatgggcagaagatgaagagggagcgcgtggtctgcttgaaaacaataagattacatttattccatgtcatcatgtgaatgcagttggaccaatgggaggctttacatcacctaatatgccggttcttgttgttatgaacaaagagagcggcaatgaggcgtactgtcaaatgaacgaaggcatcggtgcagtattacgcttcggtgcttatcatgagcaggtaatcaatcgcctgcactggatgaaagatgtgttgggtccagtgttaagtaaggccttaagaaaaattgatggaggcataaacgttaatgttttgatggctaaagctattgcaatgggggatgaatttcaccagcgcaatattgcagcatcattggtgtttttaaaagaagttgctccagtaattgtggcattagatgatgttgaaaacgaacaaagtgcagaagttatccaatttttagctgatacagaccaatttttcttaaacattgccatggcgactggaaaagcaataatggatgcagcgcgtacaatcaaacatggtacagtcgttactgcaatgtgccgaaacggtgaaaactttggcattcgtattgctggtatgggagatgagtggtttacagcacctgttaatacaccacaagggttatattttaccggctactcagcggaagatgcaaacacagatatcggtgattcagcgattacagaaacaatcggtgttggcggcgtagcaatgattgctgcccctgcagtaacacgttttgttggaacaggcggatttaatgatgcgcttgaaacaagcaatcaaatgactgaaatctgtgttggagaaaatccgaactttgttattccgacgtggaacttcaaaggtgcgtgtttaggtattgatgcacgtaaagttgttgaaacaggcataacaccggtaatcaacacaggtattgcacataaaattgcgggctatgggcaaattggtgctggtacagttcatcctccaattgaatgttttgagaaagcaatcacagcatatgctgaaaaactaggttttcaaggatgattttacaggcaagtgcgattggttcaatcgcacttcagctattaattgagggaaaaacgtttactgtgcacagcatttttgaaaaaggtttaaatattgttgatcagaatgatgaattgatatttatcggcacaaatgaaaatgggaccttcccatttggaatcttgcttggctcacaaacgaagcaaactttaaaagcaggtcttgaggtgggagattcattacaagttcgaaataaccatctttcccacaactgttttaaactcaattttaatgcgaaaatacttccgttatatacggattttaaacatgcaaacatcaataaattaaaagaaaacgtgaaacaaatttcatttaaatcgtatgaatctactgattttgaatcagctcatgtgtcggacttgataaaaaaattacacgatccaacagaaaatttggaggaagagcttcgttactttatcggtcggggccaaggtttaacgccaacaggtgacgatatactggtcggtatattatatggacacttcatcaactcttttatcgccgaaaaacaccttgaaacattgggaagtctaatcagagaacccttaacaacccttgtcagcacgcgctttttaacttgtgctatagaaggcttgtttagttcaaaaattacaaaattacaacatgattcatctttgaaaagtataaaaagtcttataaaagtaggttcttcttctgggatggatactttatatggaatttatatggctttaacaaaggagtgaaagaaatggggaaaagtgtagtaatcgcactaggaggtaatgcaattttacagccaaaacaagaagcaacttatgctaatcaattcaaaaatgtaatctctgcaacacgtcatatgattgaaattaaagaagcaggacataaaattgtgattacacacggcaatggtccgcaagttgggaatattattgctcaaaatgaagctgccaaaaatgtcgttgaaccgctgccgatctatgcttgtaacgcagaatcacagggattcattggttatatgctcgaaaaagctttaaaaaaccatattaaaaaacggggcattaccgcgaatgtagctacatttctaacaatggttgaagtggacaagtatgataaagcatttgaaaaaccaacgaaaccaataggagtattttattcagaggaagaagcgaagaaattggagaaaaaagggtttgctatgtcagaagatgcagggcgtggctatagacgagttgtgccttccccagaaccgaaagtgatccatgggatagaagagattcgacgtttaattgatgaaacgattgttatctcctcgggcggcggcggtatacctgtatatcgtgacgacagcggtctattacatggtattgaagcagtaatagacaaagatcgttcaggattaaagctggcacaacaattaaatgctgatgttttcatgatgttgacagacgtaccaaatgtgtttatcaattttggcaaagaaaatgagcaaaaactaagccgaattacagtagaagaagcagaacaatatgtggcagaaggtcaatttcctgctggcagtatgctgccaaagatgcaagcggctatagaatttgcaaagttaggtaaagaggcaattatttgttcattgaaccaagcggcagctgcactagacggaaaagcggggacgcgcctaacaaaataagacgatccgtgtatgttcataaggtggataaaaactaaaattcccaccttttcagatatgacgacatttgatctgtcattctgatcaaaaatttctgaacaatctttataatgggattctttatgctgcgcagacagatttcgaaaagaaacaatctatgaagtctaggatcgaaagtcaaaggattagtggaaaaagttgaaggaggaagtttgatgacaaaagaggcgggatcagttgaaggtaaaggaaaacaaccactggttccctattgggtaaaagttgttatcgtatttttcttcggttgggtggcttatgcaacgcgaacaatattaaaccccattatgggggatattgaatcagcgttttcattaagcaaggcacaacttggcttaattatgagtatatttttcatcggttatgctggtatgaatgttcctgcaggaatattaggagataaaattgggaaaaaacgagtgttggttccaggtgttattctatttggctcgcttgcagcagttacagggatgatgcccacattctttctgtttatctctgcatggcttatggttggtatggctcagggggtatattatgggccacaatatggaatatcatccgaaattatcccgaagaaccgtctaacattaggcagtgctgtgattaatgcagggatggcttttggtacttcaattggctattatatctccagttatgttataggagaatggggattcggatggagaaccccattttttgccatcgcagtgccggttgtacttatcggcatcgcaatggcaattgtaattaaagacaaaccaaaaactgataaagaggttaaaaggagcgctgaaccgtttaagttttcatctttatttaatagaaacttaattttggcatatattattattttctgctctatttacggattctttatgattattacttggttgccatactatttagaaacagcacgcggtttaaccggaggaaatattgcctttgttgcatcacttgttccatgggcagcaattccaggttcattattttttagttggctgtcagataagttaggccggcgcaaaccagtattgctcatgatgttgccatttggtattttatcaacagctgcaattgtttactttgatagcttaccaattctgtatatgacactaattgtgtatggaattgtagggaaaattagcgttaaccccgttttaattgctgttgtagcaaataatgcaccaaagcaatcattaagtacagcatttggattctacaactttgttggaatgttaggttccattttagctccatatattactggctggctgacagacactacaggaagtatgaatataggattttattttgcagcagctctgttagtaatcgcgttgattgcaacatatttaatagacgaaagtaatttgccatctgttgataaagcagctaaacatcattagttagcaaaagcttatgacttctagtaaatgctcagtcagattaagtatgaagagactcattcactgcaattgcgcttcaagcggcacaacaaaggcgacagccagaggctgatagatgcaaataataaacaattcggaatcgtggtgttaaaattcagcagcgtctgcaaaacagcatgggctaaaatgacgctggacaaagcagtgtccttaggcttggaggcgaatgcatatttgaaaagaaacacagacggaaaagaactgagctgcagcccggctggaggaaaaggaaaagtgctcccggggcagacatcctgttatacaccgatggttgatttcgatccgcgttcttcatatgcgatgtagaaacattatcaatccattaacaggagctctcacttattcctatacaagttcgtattcatatttgaagaagtagtgtataaaagcaccctttcagcaagggtgctttttgctgtcttatcagtcacggtttcacagctattgaagagtcatttgacctaataaaagagtgggaaaagtgggggattcaggaaactgtgtaaaatgaactattactattaatttatacagggaggaaaatatagtatgatatgaataatgaataaaataacaaaaaaattgaatatcggaagaaaggagctccatatgaacaagatcgccgcggaagaagtcgccaacatccttaatacatggtaccgcgccatcagaagaaatgatgctgaacagtcgatccgaatatttgaagaagtcaaaccgatgctggcagagatggaggaagaccaagaggttttaatctactattctctgctggaactgcggcataaaatcatgctgtatgatacgcggggaaaaaagatagaacagcaagaggagttaacgaacggcggcagtgctgcatcacatatgacatcctattactactacctgttttcaggagcttatgaagtgtataaaaagaattatgagcaggcgatcagcttctataaaattgccgagaagaagcttgctcatgtacatgatgaaattgaggtggcgcaatttcacgataaagtcggaaagctctactattacttgggccagaatatcgtctctttaaaccatacccggcaggcgatggaaattttcaaggggcatggcgaccatgatatgaaccttgtttccacttatattacgatggccggaaattatacagagatggggaaatatacagaggcggaagaatatttaacagaagccatccatacggtaagaaaagccggcgactgttttaaagaaatgcagctccttcataattttgccttgctttatgcggcgatggacaattcggaaaaaagcattcagtttttagaaatcgttttggatgatcaagcatatgctgcatcagattattatttcaatgctgtgtttttaatgatcaaagagctgtttaaagtcggagaccataaacgcgctgcagccttttacaaagaagggaaggaaaggtcgaaatccgcggcgaataaaatatttgacgccaaaatcgatattttatatgcggcttatgcaggagatggtgaacaggcggttaaagactgcaaagacaacattgaaatcctgtttcaaacaaagcaatacgacagcgccagagaactttcgctcttaacggccaatgtttacagatcaaagtcactttataaagaagccgcacatttctttttggaagcgattaaagcggaagaaaaaatgaaaaaagtggagggaatgtgatgaaaaaactgttcattgttgctgcgattgctgccgtcgtatgttcgggatggtttgcggcagaaactcactgggcatccggcgacatgcaggttgctgaaaagatggtcggttaaatcgaatactcggaacaaatatgaacatccgctcctgagcatcagggcggatttttttgggaaggtaaagtaaattaaggcataagaaacgcggttagacaatgaacacttcttcaccactatttagggtggtcaacctaaacaaaggtacgaaacctgtgctgactacttttactccgatgtcctttcagctattcttgtcagtaagatcattccccatctcttcaacgcctcaggcatcacctattaaaaaaatcataattgaaacttgtcagcaaatatgttgcataacacgaggatgtttccacaataattaaacattaagacttttttgacttccagaaggaagaacaagatatttatgtaaaatcactcttttattcaaaatcaagatctctttcttgagggttttgcttttgagtgaaaatcccattctaaatttatccatttaatggtattatttacttatataataaagaaagtgggaaacaaaacgttgatgttaattgcttttgaattttaccgaactatactcccagcatgaagtatttgttattttcaatttctttagtgtgataggtgcatttgttggatatttaaagagcaacggaagtattcaaatgcccctcttaatgattgattataaaagaaagtgggaacacaaaaatgtaagccactttaaaaatcattaaagttttcacggattgttattgagttattcctttttttattgggattagatatggaagaaacaaaagaaatgatgaaactatgtttgaggtcatttcttttgatatcctattatcaaaattacataatcaaagtaaagagcagaccagcggcctgctctacttttatacgagccataagatgatttccgcaagggaatctgctgtttttttaggaactccggctttcactaaggcttttacaagagcgccttttgaagcactatttaatctttctgtggcatatgcaattttacgtgcatatttgtcgacgagtctcgctttagaaggagagagtggtctaatcgcccatttaagagtttttcccccaactctgcaaacccatccaaatgcttttatggcttttagagatccaccaataaggcctgcagtatgtacttgtccatcctgatttaactgattgtaagtttgaaattctggagtttgtgatgcaaattggatgaatgctttggaatcttctagagtagtaggctcttgatgtgtttccatatattcttgaagagaagctggcaatgtgacatccgtcgtttcggtaattgatgtggttgactgttcttgttcagcggctgagacagatgatgcgaacccactaaatcctgaaatgataagggttgtggccgtaagtgttatcacaccttgagaaaatctttttttctttgattacatttcaaattcccccaattatttgatattcttaacaagtaatataataccacaaaaagagaggaataggtataaatgggtgaaaaaaccaaagaaaaaaactactctattggggatcatatttttgcaatattggttgttcttcttatgtgtttatttcttatttcttccccttttctgatattcttcggagtctttaaattggtcgctttggcaccagatgtgtcaatcaatacaaaaggtacttttgattctgtgatcgttttattcaagttttttgttctcactgtggtagtcgtagggattgtagacgtagtgttttctcagattttattgaaaaaacgggggtttctcaattttgttattgaagctttgttgatgttttgtgttttttatctatatgtattgatttattcaatgcattctcaggagattgttatacggaataatggtgtattcttagtatctttatttttgtttattttgtatttgctaataaatgtagcatatatcgtttcacggcggttatataaggcaactatgaaaaacatacagaaaaagaacaactaaaagagcaggcagctgtctgctcttttaaaatttcaatcgccaaaagttccgtgtcttaatattgaaaccataaattgaatagactcttaatccgatttataagcacttcaggaacagcagccggatctagagaagtccaaaaagatcgcgattgaaaaaacttattttttttaatattgaaaacttttaccttgtttgttatgattttttttagtaaagtttagtgaatacggattccaaagacaggacgggatgaaaatggcgacgattaaagagattgcgcttcaggctaaagtatcaagcacaacggtttcaagggttctgaaccatgaccagtcattatcagtagcgcctgaaacaaggcagcggattttggatatagcagcccggctcggctataaaagcacgcgcaggcgccgcgaggtatatgcctcaggaagcggggaaagcccgcgcatcggcattgttgtctgccaatcacaggaagaagagctgaacgatccgtacttttattccatcaggcagggaattgaaagtgagtgttttgaaagaggagcgtttattacgaaatttattcagctgagcagcatccgctcgaatcagcctgtaggcgatgtcgacggcttaatcgtcatcggaaggatcaactttgccggtttgcagcagtgcatgggcgcgctcaacaacgtcgtgtacatcaaccatacagacaatgaagagctgcgcgactcggttgtcgtagattttgagaaggctacggggagggcgctgaaccatttgaaatcgctcggctatacaaggatcggttatatcggcggaagagaaaaagagcactttcgaatcagcgatcaggagacaagcgccattgaaatcgaagacaaacgtctgactgcgtttctggagatggccggttcggataacgcaaagcacatttatatcagcgagtattcgatgcagcaaggctatgaactgatgaaaaaagcgcttttagagaaaaacgttcccgaagctttttttatcgccagcgattcaatggccatcggcgcgctccgggcgcttcgagaatcgggactcaaggttcccgaagatgttgcaatcgtcagcttcaacggcattgaagcgtccgaatttgctaatccgccattgacaaccataaaggttcatacagaagagatgggccggacgggtgtgaagctgctgctcgacagactgaaaggaagggaactgccgctgaaagtgaccgtaccttcagagctgattattcgggaaagctgcggattcagcaaacggagctaatggtagaataaggcgctttccaaggaggtgacacaaatggatttactaaattccagtaaataatgaaagcgctttttattcaccattaaaatatcataattggagtgaaattgatgaaaaaaatcattttctcttttgttctcctgatcattttgtctgcaatacttgcgggctgctccggaaagaatgccggaaagagcggagatgtcacgctcacaatgttttcgacaatgacaaacgacagtgaaaaaaacacgctcagaagcatcgcagatgattttgaaaaagaaaatgaaggcatcaagatcgatatcagctttcccggcccggactatgaaaatatgctgcgcgtcaaaatggcggcaaatgacatgcctgatttgttcgatacgcacggctgggcgaagatccgctacggggaatacactgctgatttaaaagacatggattgggtgaagcatctcgatccaaacctcgatccgattttgaaggatgaaaaaggcaaagtatatgcctaccctttcaatcaggcaaaagacgggatcgtctacaatgccggtttcttgaagaaatacggtctcaagcctccgcagacgttggacgaactgatgcatgcgctggaaacgatcaaagaaaaaagcaacgggagcgtcattcctttttggtttgccggttcagataaaggcgctttagctcagttttatgatcagcttgccaccccgctgctcatcacagatgatcgccgcaatgaaaaaaaagctttggaaaacggcacattcgactggtccgactacacacttctcgcagaaacctttaaagagatgcaggaaaagcaattgatcaataaagatatcctgacggcaaaaccgtcgcaattggtcgaattgatggcgcaggaaaaaatcggttttaccctctcagtcacgtcgatcggccctgatacgagggaagtcaatccagatatccagttaggcgtgatgccgacgcctgccgtttatgaaggcgacaaaccgagctggattggaggagagcgccataccgttgctgtctggaaagactcagaacacctcgaagaagcaaagcggtttatcgaattcgccgcacagcccaaatacgtgaaaaagatcgccgaagccacctcatttcctcaggcattaaccaacacagaagctgaaaactactattctaagttttatgatcaatatgaagaaatcaaaatcgaaccgtactttgaccgcgtctatctcccgagcggaatgtgggacgtcatgggaacgacgggacaggaactattggccggtacgttaacgccgaagcaggtatcggaaaaaatgaaacaggaatacagcagattacaagaacaatagaaaggatcgttatcatcatgataaaaaaagaagggtgaaatgatgagcgaattagctaaagaaaaaagtctgactattgtgaaaaggagatatgtgaggaaaaatggatcgctctggtggatgtatcttcccgccttggcgcttgtatccgtctttatgatttatccgtttgcgagcggcattaaaatcacgttcacgaactggaacggtttctcacagtcgtatgactggatcggctttgcccaatataaacggatgctggccgacccggcgacatggcttgtcgtcaaaaacaccctcctgtacggattgggcagtacggttttccagaatgtcatcggtcttctctatgccctcctgctgtttaaaagcatcaaaatgaaagcgctgacaagaacggttgtctatttgcccgtcatcatcagcccgctgatcatggggtatatctggtacttcttcttctcctatgaaggaggcgccttgaacgatttgctgaaactatttggagcaggtcctgtcaacgccttgagcagcccggaaatcaatccgtggatcatcgtatttgtcaattcctatcagtttgtcggtatagcgatggtcatttatttagcaggtctcggaagcgttccgaaagatttttatgaagcggcgcaaatcgacggagcaagcggttttcagcaattttggaagattacgctgccgctgttgatgccttctgtcacgatcaacatggtcatcaatatcatcggcggactgaagctgtttgatgtcattttagcgctgacaggcggcggtccgggaaatgcttcgcaatcgatgtcgacttttatgtacgatctgtattttaagaggcaggatgccggctatgcagccgctcagggggttttcatgtcggtgttgatactgctaatcagctttacggctctcatctattttaagcgcaaggaggtcgaagcctagatgaatcgccaagagaaaaagaaacgggcgctgtggactttgctggctgcatggattaccgtttttcacctgattccgttttatattttgctgacgacggcgctgaaagcaaagggagatttcagttcaaaatggaagttcccggacgaaatcagcctcggtaattttgcagaagcatgggataaagcaggtctggccggctcgtttttcaatactgctgtgatcacttttgcttcggcggctctgctcattgtgatcggctctctggcggcatatccgctcgccaggcgcagaacaaagctcaatcaagccgtttacttcctgtttatcggcattatgatcattccgccgctgacatccatggttcctttatacaaaatggtggtggagcttggcatgctgaatacgcttgaaatcgcgatattgaataatacggcggcttatatgcccttgacgatttttttgtatgccggatttatccggtcgacgattccgaaagagcttgaagaggctgcgagaatcgacggggcgagcacggcggggattttcttcagaatcgtctttcctttattaaagccggtgactgcgacgatttgcattattgcctgcgtattcatctggaacgactatcagttttcgatctttttccttcaagacaaaagtgtgcagactttgactgtagcgattgccggcttctttgggcaaaatgcgaacaacctgcacttggtggccgcggcttcgctgatggcgatgctgccgatgacgattctatttttattcctgcaaaagtactttataaaaggattatcagcaggagcgctaaaaggctagcgaaaatttcacggggaaaggaagatatgaatgactaaaattgcttttatcggagctggaagcacaatttttgcgaaaaatgtgctgggggactgtctgatggttccggcggtcaacggatttgaatttgctttgtatgatatcgatccgaagcgcctcaaagaatctaaagatatgcttgagcatttaaaaaaccgctataatgacacggtatcgatccgcgcctatgacgacagaaaggaagctttggcgggagcgaaatacgtgatcaatgccattcaggtcggcggctataaaccgggcacagtcatcgattttgagattccgaaaaaatacggcctcaagcagacgattgccgatacggtcggaatcggcgggatattcagggcgctgcggacgattcccgttttattggatatggcaaaagacatcgaaagcgcggcgcccgacgcctggctcttaaattacacaaacccgatggcttctttaaccggtgcgcttctccgctacacggacgtgaaaacggtcggtctctgccacagcgttcaagtatgcacaaaagatcttttcaaatccctcggcatgaagcatgaacgaatcgaagaaaaaatcgccggcatcaatcatatggcctggcttcttgaagtcaagcaagacggaagagacttgtatccagaaattaaaaagcgggcaaaagaaaaacagaaaacgaaacatggtgacatggtcaggtttgaactgatggataaattcggctactatgtgaccgaatcgtccgaacataacgcggagtaccacccttattttattaaaagccgttatcccgaactgattgaagaactgaatatcccgattgacgaatatttgagaaggtgcgagaagcagattcaaaattgggaaaagatgcgcggcgaaatcgtcggcaatcggcatttaacccacgagcggtcaaacgaatacggctcaagaatcatagaagcgatggaaaccggccagccgtttacattcggcggtaatgtcttgaataaaggattgattacaaatcttccggaaaaagccgtcgtcgaagtgacgtgcgtcgctgagcggaaccggatcactccgtgctacgcgggcgagctgccagaacagctggctgctttaaatcgcaccaatatcaatacacagctgttaacgattgaagcggcaacaacaaaaagaaaagagcacatttaccatgctgcattgcttgatccgcatacggctgcggaattatcgatggatgatatcgtaagcatgtgcgatgaattgatcgaagcacacggcgactggctgccggaatttgaataaaaaaataaagcctgagcgaagggatcagccttcaactctggcttttttcacgcgagggtgtgtatatttttccgatttttgatgaagcaatcggaagaatggaggaagcattgcgatcacgagcaccaccctcaacacttggacagcgacgacgaacgtagagtcggcgtgaagcgtgacagacgttgtcgccatttctgcgattcctcccggagcaaacgccaatatggccgttgtcagcgaaatgcctgccgctttggcggtgacggcggcgcttaaaatcattgcaatgatcagtccgacggagctggcaagtgcgacgatcagcgtttttctgacgccgataaacatatctttgctgatctttgaaccgatcgttgcgccgagacaaatttgcgacagcactgaaaagccgtggggccaccaggcggttgtgctgagtccggtcattgaggcgcccgcgatttgcagaacggccgcgccggtcatgcttccgagcagccatggcgcaggaaaccgcagtgctttcatagctttgcataccccgaatccgcccagcacgatcaacgcagtccatgcgatatgaggcgcttcaaatgccgatgttcccgcggccatcacttggctgccggcagcatgggcgtcgggatgcttcgcatttatgaaaaaaacgaaaaagggaatggtcatgacgacgagaagaacacgtatcatctgcacgagactgacgattgccgtgttcgctccgacttcctgagcgatgcccggcatcgcggaaagcccgccgggagccgttcccacaaagctcgtcagcatatctgtcttgctgaatctccacaagacaaagcccgacagcatggcgaacacgacggaaaggagaagcatgacgccgacaatcagccaattttccttaaagatcgaaatcacagacatgttgattttttggccaagctcaattcccaatagcatttggccgaactgaagccatccatggtggatgccgttttgtctgaccgccgctttcaacggtgacgggcgaaacagcgacagacaagcggcggcggtcattgttccgaccatccagccgattgtcatgccggtcaatgagagaagaaatcccccaaaactgctgatcaatatcaataatatatcccgaaggaaatctcttttttccctcaaatgaaaaaccttcttcctgtttactgcggaatcattttgttcactaagtaaagtatttctatatattactatataataattttagtgattggtaaaatacgaatttatttaaaagattaataagaaaaactaatcgtttatttttgaacataacagatcgaatatatgaatacattaaattagattgatcataaatagaggtgaaccgatatgaaacatcccaaggaatcattcaccaaagtcaaatcgtatcgaccgtttcacagcgcctttgatccgtgtccgccgatcggcaaaagatactacagaacccctccaaatctatatctaggttttcagccccgcggccttccgcagttttccccgatggaggcgctgcaaaaagggacgctttggcccgtattttacgatcattatgaaaatccgtatgaagatgggaggtaaggagggtgacgaactctttaccgcaagactattataaaaggcttcatgaaattcaggctgttgattttgtcatcgttgagctgatgctataccttgacacacatcccgatgataccgatgccatcaaacaatacaaccagtatgccggattttccagaaaactgaaagcgaagtttgaatcaaaatacggccctttgattcaaggaagcccggatcagacggaatcctattggagctggaaaagaagtccttggccatggcaagtttaatagaggaagggagtcaggttcatgtggctttatgagaaaaaactgcagtatcctgttagggtgagagaatgcaatccgagacttgccaaatttttgattgagcaatacggcggagcggacggcgaattggctgcggcgcttcgctatttgaaccagcgctacagcatacccgataaagtcgtcggactgctgacggacatcggtacggaagagtttgctcaccttgaaatgattgccacgatggtatataaattaacaaaagacgcgacgcccgagcagatgaaggaagccgggctcggcgatcattacgcagaccatgacaaagccctgttttatcataacgctgccggcgttccgttcaccgctacatacatccaggcaaaaggcgatccgattgccgatttatatgaagatatagcggctgaagaaaaagcgagggctacgtatcaatggctgattgacatgtcggatgatccggatttaaatgacgggctggcgtttttacgggaaagggaaatcgttcattcacagcgcttccgcgaagctgtcgaaattttgaaggaagagcgcgaccgtaaaaaagtgttttaaacagcaaaaagccgaaaatacgaccgtattttcggctttttatttactgcaccgggctcgcaagcagttctgctgcgcggtcgcgcagcacatatttttgaacttttccggatgcggtcagcgggtattcgtcgatcagaaatacgtactccggaattttataatacgaaagctgtcctttgcaaaaatctctgacgtcttcgagcgtcagctttttgcccggcctgcatttaataaaggcagccgttttttccccgtacttttcatccggaacgccgacaacctgtacatcgacaatatcctcatgttcataaaggaattcctctatttcacgcgggtaaatgttttccccgccgcggacgatcatatcttttaagcgcccggtaatcctcacgtatccgtcccggtccatttctgccaaatctccggtatggagccagccgtcttcatcgatggccttttttgtggcttcatccattttatagtagcctttcatgacgaggtatcctcttgtgcacagttcgccctgctcatccgggccgagcgtttccccggtgtcaggatcgacgattttcatttctacatgcggatgcacttttccgacggtctcgacgcggcgttcgatcgtgtcggtgacggttgtctgcgtaatcacgggtgaagactccgtctgtccgtatgcgattgtgatatccgtcatattcatttgcttcatcacttttttcatgacttctctagggcacggggagcctgccatgatcccggtccgcagagaagagaggtcatagtttgcgaaatcggggtgggtgagctcggcgataaacattgtcggtacaccctgcagccctgtacatctttctttttcgaccgtttgcaggacgatgtccggcttgaattcgatgattggcagcatggccgcgcctgacgcgacgcaggcaagcgtgcttaacacacagccgaagcaatgaaaaagaggaaccgggatgcacagcctgtcttcgctcgtcagccccattctgtcggcaacgatcgccgcattgttgacgatattgtagtgagtcagcataacaccttttggaaagccggtcgttcccgacgtatactgcatattaatcacatcatcgtgtgtgagtgactgctctcgttcaaaaaggtcggcatcagagaccgtttcgcccattttagcgatctcggcaaaagccgtcatatgttcaggggtctcgttcttgccaaggtagacgagatttttcagcttcggcagcttttcaggatttttcatgatctcatcgatcatattgatataggatgttcctttgtagccgtccatcagaaagagggtggtggaatcggaatgttccaataagtactcgagttctctcgcctgatagctcgtattgacggtgacgagcacagcgccgattcttgccgtagcaaactggagcagaatccattccggaatattggatgcccagatggcgacatgctcccctttttgaatgccgagcgcgagcagcccttttgcaattttagaagtttcttcaacaagctcctgatacgagtatcttaaatcgagctcagaatatacaaccgcttcatgattcggaaaccggccggcggttgattttaaaagcccgccgatcgtttgtttttttaatgtaaccatagtgcctccttgcctcccgaataaaatctgtttccattatagcactttgttctagtaccaggtactataaaggactagtttttttaaccgggacactgctcgatattgtgcaatccccccgagagccatgatccctgcaatggcaagaaaaagcgctgccccgccgaacttgatgaacatcatcccgcctaaaaaaggaccgattgtccgggaaatatcccaatgcaggccgaaaaatgcaaaatatctgccccgcatatgatcgggagcaaggcgcgagacaaaggtttgcatgtgattcagcagcatgctttctgccgccgtaaataaaacggcagtcgagagcagccaaaagatcgatgatgaaaaagcgaaaccaattgctgccacagcgtagcatacatatgatatggaaacgaccgtttggatgttcagtccttccgtccatttgacaagcggaatttgcatcgtaatgctaagaagggcgcggcacactgtataaacagtcaagatgaataggaaatcttcaaaaagagtttcgagataaaggcggtagtttgactccagttgagcatagaacaggctgacggggaccgacaagaacatcaaggacagaaccggacggtgctgaaaaaataccttttttgcggaaagaagtttttccctctccaaaatctccttttgcctttttgaccgccatacctcgggcattttaaaataaacaacaagccaatagagaaaaaacgcacatgcctgaaagccgaacatcaggcttggctgataggaatagactgcaagtccggcggccggaccgaccgctgcgcccaacccttcaatggcatgaaggacagcgaacgcttcagagcgacgcccgctttcggtgctgtccgttatttgggcccgctgcgcagggatgtacaaagctcccccgatgccgttcagcacataaaaaagagcgaacagccaaatgtgatctgccatcataaaaccggcggcagaaacagtctgaaaggcgagcgccgtcaggatcaccttccgtcttccgatccgatccgtcagtcctcctgcgacaagcgtcaccgcgacctcggtcagcggtcttgctccgatgacgagcatcaccggcaatatgccagttccaagcacatcatacagataaaaaaggaggaaaggggccagcatggctcccgttattccggtcaggaactctccgaagaagcaaatcagcacgggagaaccgtacctttgttttaaacggttcatttcatatcctccttcaacatagcagtgcaattagtgtaaaatggaaaatcatcagtaaaaaggacagaaaaccaggggagaaatttcccttttataaagagggggataacggagatgaaatcgatcgaacattacatggaacttaccgcgggaattaaatgcgaaagcgaaggggaggcagaagagatttcagtcagtgaaatcgcggatattctgtattgcacaccgaggaacgcaaaactgattttagcgaaacttgaaggtttgcagtggattgcttggaaaaggggaagggggagaggaaacaaatcagaaatccgctttttaaaagaaccttgtgaactgctgcttgaaacggcgaaaaatgatacgaaagaaggtaaaatcgaccgggcgagacaccttctcgaagcatatcagcattcgtgtccggacgcattgccgtcatataaagagtggcttgagcgcgttttcggctttcagaccgaatcggagggcagcaagcaaaaagatgtgctgaggctcatgaccgcgatggagccagagcattttaagcgtcttgatccgtgccgtatttatctgcgttcagagagccatgtcgttaagcaggtatgtgatacattgatccgttttaatgaaaaggaaggaggttttatgccgcatcttgcccaccactgggaatgtgacgccgaccaaaaaacgtggacgttctatttgaggaaagggatctatttccatgatggcacaacattgacagctgaggatgttaaatactcgtttgagcgttttatgctggatgatgaaaataaatgcaaatggctcgtagaggatatcggaaatgttgcggtcagggataaatatagttttgatatttgtttaaaggcaaaaaactcgctgtttttgcatcatctttgcgatgaaaggctgtctattttaaaccgccatcagaatgacggactgttgatcgggacgggtcctttcagacttgtccgccgggatgaccggattctcgggcttgaagcgcatgagcgatattttcaaggacgggcttttttagaccggatcgaactatggtatatggatggcaatttttctcttgtcgactacggtttttatatggaaaaagaagaacaaagtcaggttttcgatgaatggcacgaggaaaggaatgttcagtacatctcggtgaatgcaaacaaatcggggcctctcaagcataaggcgttcaggaaggctttgcggcaaagcatttccccttcacatatggtcagtgaattagccggacaacggacggctccggcgggaggctttctaaaccgggatcttccgcctgaatccggggacgacgacatcggcaagctgcttatggaaggccattacaaaggcgatccgcttcggctttatacgttttccgaaccggatcaccgggaggatgcgtcatggatccaaaagaggtgcaggcggtacggcatcgcactagaggtttgttatatgaaagcggatgagctcatgaaggaagaagtgatcgcaaaagccgatttgattcacgacagtgcgacattcggacgttcggaagaaatgagctggctgcacctccttttaacggaaaacagctttttacacgtccatatgccgggggaatggcagaggaagtccgccttgatgagggatcagcttcgtttcattgatgagcattccaagcggatcagccttctgtgtgaggcggaccgcgccttggcagaagaggtgtacacgattccgctatatcaaaacaatattcgcgttaaagcgggggaagccattcaaggcattgtgcttaacgaagaaggatggattgatttttacggcatctggtacaaaaaagaggctcttctgtaagagcccctccattgtgtttcttaatgaccggaatgtcctccatccgctgacttaatttccaatatgccatcaagaatgccttgtgtccgaaatgaaatctcattttctgacccgagaatgaatgcatggttgtatgggccgtcttgcggcctgtcatgaaatgaaggctcgatctcggacagatagctgtatagtgtgctgtctgcctgtccatttttgagtaaaagcaggggagcgtgttttcccaaatgggaaaatggcgctccggcaagcgcaagctcgggcgcagcggttgatgcaaaggatagtccgtgtcccggatctgtgatgccccagccaaagccggtgttcttatccctgaatttcgcaaatgcaatcgaatttgcgacaggagtgtctccggaaattcttttgactgttccgtattcctttaatgcattctccgttttttccgaaaccgcttttttagggccgagaatatagatgtttgctttggcgtcccttttctttaatgcttcagccgtctcttcgggaatgccttttttgttcacgtacaggatcggctcaggcatgtgggcgatccagtttacagccgggagcgaataaagttctgcatcatcctcggatgatccgatgatgacgcttttcggatattcaccggctgcctccgcgtattctttgtcaatctcttttgccagatcagccgcgttcttccctttgagctcttttattttaaaagtgttcaaagcttgaagcgcttttgaatcaaattctccgacagccatgatttgcgtcccgtctgaagtgcccgtcgggttcaagcgtttgatttcattctgaatttgcccggagattttccctttttccgcgattaaaacaggcccgttatttggatgatggatcaaatctgctgatgcaagagctgtctgccatgatccgcccgaaactagaatcactgcgcccggcctgttttgtttatgagtggccggccatatcgtttgagaggttttgatgctcatgtcttctggtgtattcgcgtcaagccttgtcgagttctttgtgtttttcaccaggagcccctcttcggcccgcttattgaaatcactcggaagagaatcagcgtctttttctttcatctccgaatgatcctttgtatgatgctcctcatgtccgccagtgtttcccgagccggaattttggcatgccgcaagcggaagcgcgaaaacaagcatgacaaaaagtaaaccgaatctcaatttcattgtgttttccccctttttggttcagattactgagtagtatacccgggaaatgtgcaaaactggtgcagacatctcgacattgttacacatcggaaggcagcgtgatgataaattcgcttcctttcggggttctgtttttcgctgcaatctgaccgccatgaagctcgacgatttctttcacgatggccagacccagcccggtaccgccggtttgtctggacctcgatttatcgatccggtaaaagcgctcaaatatataatcccgttcttcttccggaatgccgcagccttcatccgctaccgtaatcttgacctggtcctccaattttgatgcggtgacggccgctgttgattcaggatcggagtattggcgggcgttgttcagcaaatttgagatcacttgtgaaaagcggacctcgtcgactgtgacataaagatccgtcgggatgtcgaacgaaacgctgattcgcttttccgaaaaagcgaccgccgctttctgaatttcttttttcacgaatgtgtaaaggtgaacctgtttcttattgatttgaaatccgggctgtttcagttttgtcagcaaaaataaatcgtcaacaagggtgtttaaattgtccgcttcctctttgatgatcgacaagtactgatttctggcttgcggttcgagcttatctctcatcgcgacatctgtgtagccttttatatatgtgatcggagtccgcagctcatgggcgacgcttgacagaaaatcgtttcgctctttttgaagcctgctgagatttgaggaaaggctttcgattgatgcggcgagctctccgagttcatcattccttttgatatcaagcggaatcgaagcttgaccgtttttgatgctttcggttgcctccttcagtttaataatcggcttcgctaaaacacggctgaaccaaagaatagctgcgaccgttaagacgccggttaagccgaagctgaggaaaaaccgcttcgtaatgcttgccaccaaggcttttatcgaggaggtctccaaatacatgaagacgtagccggccgtttcccgtccgttcatgatcggactgatcgtacaaatgtactttgatgtattccaatgggaagataaagcggtcccgttcctcgggatgttctgttcttcgaaatgaaggtgttccgtcatgtctcccggggcagactgcgccaatacgcgtctgttttggtccgtgatgatcacgtttgtccgggcttcagtctccatcagggtgacgtggtctatcgtccttttgtcaaaatgcttttcgaggacgtctctgtggctgttgcctcttagttgaagcgcgcttatttcttcgtttattctcgtgttgacaatcgttgtatacagcgcggcaaaaaggacggcttcgatgaaaaggattaaaacgaaaaatgaacctgcgagctcaaatgaaatctttttcatgctccggttcctttgcttgtccatttgtagccgacgccgtagacggtccggagatggtcttcaaccggaaagcccgcttttttcaatcggtgccgcaaatttctcatgtgcgaatcgatggtgcggggctcgatatcagagttgaatccccagatgttctcaatcaattggtctctcgaaagcacttgatccatatggtctaagagtgttccaagcagatcgaattcacttggcgtaatgctgatttcacggtgattgacatgcagggtatgatgctgtttattccagattaaaccgcggaacctgatttcatgaaatcggcgggttctgcgcaggacggcttctattttggcaagcagcactttttcgctgaacggctttgttaaataatcgtctgcaccgcagttcaggcctcgtacaatatcatcctgcccgttttttgccgtcagcatgataaccggaatgcttgtcaatcttcggatctctttgcaaaccgtccatccgtccatttcaggcatcatgatatcgaggatgacaagatcgaaattgcgcatttttattaagtccagggcttcttttccggtggcggcttttgtgcacgaataatgctctaaataaagctccagcagatcgagcatccggttttcatcatcgacaagcagcacgttcaatgtctagcacctctttagtcaaaatataagtccgctattttaaaaatataccctataagggtatattgatcaaggcggaacgaactgaatcacctctttgacaagaagtataaaaaccagactgcatggttttgttcgtcagctgccgcccgcttgaacgcatcccgtatcgcccggtctttgacagtctgcgatgtccaaataaaaatcaaccgtttcctgctcgtcttttaatgcggactccagcgcgttccaatactgttccggacaaggctccgtaatggaaatgtcaggctttcggccggcaagagacgtataaaatgccaggaacgcattaaagtggcggatttcgtcctgtctgatttctaaaatttgctgttttgcctcagcatccggggccttttgtgcgattttttggtagcagacgaccgcactgtgctctccgtttaccgctttttctagatctttgatcagcctgttgttttgcctggcgggataggcgggatgatacggctgaacataccacatgtttttcacctcaatatcttatattttgccgtcctgtcattatatgtaagtcgaagcttgcatgtgcctactggaagggcgcatctcggacatgtggcaaaatggtgtggggagagcgcaatctattttaaaaaaatgaagtttgacgtaaaatggttgttagtgccgaatggtgacatacatatcaaaatggagtgagactattgaaaaaggcaatattgacggtcatagctgtattgacgtcggttgttttgttcgccggctgccaagcggaaaaagggggatcagccaaggggcagtctgaaaaagttcaaattacggtttccgcggctgcgagtctcaaggatgttttaacagaactttcctccgtctatgagaaagaccatccgaatgtctctataaagtttaattttggttcatcgggtgcattgcagcagcagatcgaacagggcgctccggctgatttgtttttttctgccgctgaagacaaatttaatagagtagttgatcaagggttaattgacaaaaaagactctgtcaagctggtcgaaaacagtctggtgctgatcgtgccgaaaggaaaaagtcagcatgtcaacagcttcaaggatttggcggatgacaaagtcgaaaaaattgcgatcggcaaacctgaatcagtgccagccggaaaatacgcaaaagaaacgttgacgaaccttgacgtatggtctaaagtgcaatctaaagtcgtctacagcaaagatgtaaggcaggtcctttcttatatcgaaacaggcaacgcggatgccggaatcgtttaccggacggacgccctttcatcagatcaggtcgagaccgtagagacggcgaaaagcgatctgcatacaccgattgtctatccgctcggaattgtgaaaaatacaaagcacagggaacagtctgaggaattttatcaattcctgcaaagcgaccaagccgtcaaggcgatggaaaagtacggatttaagaagggctgaccgccgttatgcttgaggagttcttatccccaattgaaatttccatccaagtatcagccgcagcgggcatcatcgccgttttgcttggaactgctgcagcgaggctcctggcgaacagaaactttaaaggcaagtccattatcgagacggtgatgatgctgccgctcgttctgccgccgaccgttgtcggattttttttaattgtgatcttcggaaggcagagtgtgatcggacgcttgattgaaaacgtgtttcaagcgccggttatttttacctggtgggcagctgtgatcgccgcggcggttgtcgcgttcccgttaatgtatcagtctgcaaaatccggatttctggctgtcgaccgcgacatcgaggatgcagcgagggttgacggagcaaacgaatggagggtgttcctctttgtcaccgttccccttgcatccaatggaatcatgacggggattgtgctcagctttgcgagggcgcttggcgagtttggcgcaacgctgatgtttgcgggcattatcccgggggtgacgcagacggtgccgacggcgatatacttggcgatcgattcgggcaatatgacgctggcatggatgtgggtcgcctctatcgcgatcatctcgtttttgatgctgttttttgtgcagttcaagcaaaaatagccgtatggggtgcaagtgctcatacggttttttcccagttttggagaatggttattttgcggatgtttcgatagaataaagagtaagaaacagaaaggagacgggcttagtgggagcagtatttttatcaggcagatccgggagtgggaaaacgacctttatcctgaatgaaatcagagaaaaacttcgcgatgaaccgctcggaaaaccgatcatttttctagtcccggatcaaatgacgtttttaatggaatacgagcttagcaaaacaccagatttgggcggcaccatccgcgcccaagtgtacagtttttcacggcttgcctggcgagtgctccaacacaccggaggcatgaaccggccgttcttgacgggaacgggcattcagatgctgctgcggagactgattgaagagcataagggcgagtttaaagtctatcaaaacgcaagcgataaaagcggatttacggagcaggtggaacggatgctgaccgaatttaaacggcactgtctgccgcctcaaagcatccgggatatgatggaagggacaggcaagtcggaatacgaagatgaacggattctttccgataaattgcacgacttatatattttgtacagcaagcttgaggaaaatctggagaatcaatatgttcaatctgaagattatttgacccttttagccgaacagattccgtatgcggaagagattagaaacgctgccgtttacgttgacggatttcaccaattcacgcctcaggagatgagcgtactagaacagctgatggtacatgccgaagagatcacgttttcgctgacggcggataagccgtttacggcaaacagcccgaatgatctccatctgttcaggatgaccgggaaggcgtactatgacctttaccaaaaggcgaaggaactcggccttgatccgtctgaagtgcggctggaagaaacgaaacggcaccggcatcatccggagcttcagcatcttgaacgctattttgatgaacgtcctgcaaaaccgtatcccggacagacggaatcgctccgcatcatgcaggcgtcgaacagaagaaccgagattgaaggaattgcgcgcgagattcattctttaatccgccagggccggttccggcttagggatattgctgtcatcgcccgcaatgttgaagattataaagatacgataaaagaagtttttaaagactgcgaacttccttttttcatagacggcaaggaatcgatgcaaaatcatccgcttattgagctgatccgttcgacgcttgatatcattaaaggaaattggcggtatgaagccgtgttccgctgtgtcaaaacggagcttttattcccggaaggacagccgaaggaacggctgcgcgaacagattgaccagcttgaaaactactgtattgcttatggcattaaaggagacagatggacaagcaaagatccgtttgtttacagaagatacgcttcactggatgaggattttgccaagacagacaaagagattgaaacggaaaatatgctcaatgaactaaagggctggatcgttccgccgattcacaggctgcagaagcgattgaaaaaagctgaaacagtaagggaaatggccgaagccgtctacctttatcttgaagaagccgatgttccgatgaagcttgaacaggaaaggcggctagccgaagaaggcggaaggattgccgagtcgcgccagcatgagcaagtatgggatgccgttattcaactgttggacgagtttgttgaaatgatgggcacagagcggatttcgtttgcgttatttcagcaaatgatcgaaaccggattggagtctttgaaattcgcgctgattccgcccgcacttgatcaagtgtttatcggcaatatggacctttcaaggatgtacggcacgaaatgtacatttctcatcggtgtaaacgacggcatacttccggcgaggcctgcggatgacggcgtgctttcagacgaggacagggagtggctgaaacgaaacggcgcacagctggcggcaacagggcgagagcagctattggacgagaattttctgatctatatgacgctttcaagcccgtctgaaaagctttatgtctcctatccgatcgctgattcggaagggaagacgctgcttccttcaacagtggtgaaacggctgaatgaactgttcccggacagcgaagaaaagatgctgattcatgaacccgagcagctggacgatgaagcccagcttgaatttctcgtgaataaaggcatcgccttgagccatttggcagggcagctcggcatctggacgaggcagtatgcgatcagcgatgtatggtggagtacatacaactttttaatgaatgagcctgaccgcatcttttctcaaaacatcctgtccagcctgtttttcagaaacaaggtcgaaaacctaaaccggcatgtgagccgcgatttatacggggagcacattcagggaagcgtgtcgcggatggagacgttcaaggcctgtccgttttcccattttgcttcgcacggcttaaagctgaaggaacgccaatttttcaagcttgaagctccggatatcggtcagctgttccactctgcgctgaagctgatttcagaccggcttcacgagcttaaactggattggcgcgacttaacgaaagcccagtgcgagactttgtcaagcgatgcagttgaacggcttgcgcctaaactgcaaaaggagattctgctcagttcgaaccgtcatcattatgtgaagcagaagctgcaaaaaatcattgccagggtatcgggcattttaagtgagcatgcaaaagcaagcggctttgcccccgtcggcatagagctcggattcggagggaaaggtccgcttcctccaatgcgtttcaccttgaagaacggttgcacgatggagcttgtcggccggatcgacagagtggataaagcggagagctcaaaagggttgctgcttaggattgttgattataaatcaagcgataaaggcctcgatttggccgaggtgtattacgggcttgccctgcaaatgctgacatatctcgatttgtcgatcacgcattcaaccgattggctcggcatgaaagcatccccggcaggcgtgctctattttcatgtgcacgatccaatgatccaggcttcagtgccgctcggccttgatgaaatagaaaaagagattttcaaaaagttcaagatgaaagggctactcctgggagaccaggaagcggtcaagctgatggacaccaccctggaacaaggcaggtcgaatattatcagcgccggtttgaaaaaagacggctcgctccgttcggattctgacgttgttgcagaagaggattttcatgtattgaggcgtcatatccgccggacatttcagcaggccggcgaggagatcacagacggcaaagtgtcgatcgagccttacaagctaaaagaccggacaccgtgcacatattgttcataccggtcattctgccagtttgacgaatcgcttgaggaaaacgaataccgaatattaaaacctgaaaaagacagcgtgatattggagcggctgaaaaaggaggatgaggcagatggagatttctaaaccgaagggcagcacctggactgatgaccaatggaaggcgattgtctcatccggccgggacattttagttgcggcagcggccggttccggaaaaacggccgtgctggttgaacggatcattcggaaaataacggatcaggaacgaccggtagatgtcgacaggctgctcgtcgtcacctttacaaatgcatctgcggctgaaatgaagcacaggatcggcgaagcgctcgaaaaagagcttgccgaaaatccgggatcgcttcatttgcgccgacagcttgctttattaaacaaagcgagcatatcaacattgcattcattctgtcttcaagtcatccgcaaatattactatttgatcgatgtcgatccggctttccggatcgccgatcagacggaaggcgagctgctcggcgatgaggtgctggatgaactgtttgaagaagaatacaaaaaaggcaatcctgccttttttgaacttgtagacagatatacgacagaccgtcatgacctcgacctgcagcatcttgtcaagcgggtctacgaattttcccgttcgcatcccgatccggagggctggcttcactcattggctgaactgtatgacgcggcttcggatacgaaggttgaggctctgccgttttattcttacattaaagaagacatcgcactcgttctggaaggtatgcggcaaaagctgacgcgcgcgcttgatttgacaaagcagcccggggggcctgctccgcgcgccgaaaattttctcgatgatttagcgcagatcgacaggctgattcagcagcaggatgatttttcggccctgcatgagcttgtaccgaccgtttcgtttcaacgattgaagccatgcaaaggtgatgagtacgatcccagattggttgatgaggcggcagacctccgcaacagtgcgaaaaagcagcttgaaaagctgaaaagcgattatttttcgcgaactccggagcagcaccttgagagcctgagggaaatgaagcctgtcattcagacgcttgtccagctcgtgctggagtatggcaggcggtttgcggaagcgaaaaaggaaaaggcgatcgtcgatttttcagaccttgaacacgactgccttgcgattttatccgtgaaaaatccggcgggcgaggccgtgccgagcgaagcggcgaagttttaccgccatcagttccacgaagtgcttgttgatgaataccaggatacgaacctggtccaggaagcgattttaaagctcgtcgccaaagaggagcatgaggggaacctgtttatggtgggcgatgtcaagcagtcgatttaccggttccgcctggctgagccgcttttgttcctctcgaaatataaacgctttacagacgatggctcgggttccggccagaaaatcgatttaaataaaaacttcagaagccgttcagatattttggacagcacgaactttttattcaaacagctcatgggagaaaaagtcggggaagtcgagtatgacgaacaagccgaattgaagctcggcgcctcttatccgccgaacgaagcgacaaaaacggagcttctgctcatcgaaaccccgagcggcgcgccgggtgaagaggctgaagagcttgaggcggtccagcttgaagcaagagcgatggccgggcagatccgcaggctgattacagaaaaatttcaagtatatgatgccaaagcgaaagcgtcgcgaaacatccagtaccgtgatatcgtggtgcttttgcggtcgatgccttgggcgcctcaaattatggacgagtttaaacagcagggaatacccgtatacgcgaacctctcaactggttattttgaggcgacagaagtatcggtcacactgtctttattaaaaatcatcgataatgcctatcaggacatcccgcttgcgtccgttctcagatcgcctgttgtgggtcttgatgagaatgagctttccttgatcagaatcaaagataaaaaagcgccgttttacgaagccatgaaagcgtaccttgctgcagcagacggcgatgagaggctcagcgaaaagcttcgccgctttgacggtctgctcaagaagtggagagcttatgcgaaaaaccactctgtagcagagctgatctgggaaatctaccgggatacgaagtatttggattatgtcggcggaatgccgggcggaaaacagcggcaggccaatttgcgcgcgctttacgacagggcgagatcctatgaagcgacatcattccgcggcttgttccgctttttaagatttattgagcggatgcaggagcggggcgatgacctcggaacggcaagggctctaagcgaacaggaagacgttgttcggctgatgacgatccactcaagcaaagggcttgaatttcctgtcgtatttaccgccggtctcggacggaattttaatatgatggacttgaacaaatcttatctgctggataaagagctcggttttggaacgaagtttatccatccgaagtggcggatcagctatccgacgctgccgcttatcgcgatgaagaaaaaactccgccgcgagcttttatcagaggagctgcgcgtcttgtatgtcgcccttacccgggccaaggaaaagctgtacctggtcgggacggcgaaggataaagaaaagctgcttgccgactggcggacacaagcggccgggtccgagtggctgctcccggattatgaacggtttcaggcaaaatcatatctggatttcatcggacctgctttgatgaggcacagagatatggatgaatccggggcgccgcctgtgattgatgagatccgcgaacatccggcgcgctttcaggtcagctggctgtccgccgcggatctacaagctgaggctgtcgatcaggccggtgaagaaagacacgaccggctcgtccaaattcaaatgggccatgcgattgaaggcgcctttgaatatgagcagcaagtcagagaacgactggcatggtcatatccatacaaggacgccgccaaagtcagaacaaaacaatctgtctcagaaatgaaacggcagaaggaatacgaggatgaatacggcgaccgctcgcttattcgtccatcacaggaggctctcctgtttaaacggccgtcctttatgatggcaaaaggcctgaccgcagccgaacgggggacggcgatgcacaccgtcatgcagcatattccgctgacccgtacgcctgaaaagaatgagctcagccgccttctagacaggcttgttgagaaagagctgttaacagaagaccagcgggcagcgattgaagaagacgacattcttgcattctttgatacggaaatcggacaaaagcttttcggcgcccgccgcgtcgaacgggaggttccctttaacatgacgctgtccgctaaagaggtttatccggatcttgagtcagccgatgaacctgttttgatacagggaattatcgactgcctattcgagacggaggacggtttttaccttctagattacaaaaccgaccggatacacggaaagtaccggaacggcttcgaaggggccgagccgattttaagaaaacgttacgaaacacaaattcagctttacgcacgagccgttgaaacgatgattaaaatgccgctcaaagggcgcgcgctgtacttttttgacggaggacacgtgctcttattttaatatgaagcagcttccccctgacgatttcggggggagctttaatgaaaagagaggtgaggcgcacatgcgaattttacatacagcggactggcatttgggaaaaacgcttgaagggagaagccgactgaaagaacaggaggattttcttgaagagctcgcaaggatcgtaaaagatgaaaagatcgacgctgttatcatggccggagacgcttttgacacagtgaacccgcctgcactggctgaacagcttttttatgaaagcctctcagccttgtctgacaaaggaaaccgtccggtcgtcgtgattgccggcaatcatgacaatccggaccgcctttccgcggcctctccgttaacgacagaccacggcatccacttgatcgggtacccgaggactgcgccggttgacatagaagtcgcttctagtggggagatcttgtcagtcgcggcgctcgcctatccttccgagtccagactgaatgaagtgctgtcggagacatttgatgaaaagctgctgcgcgaccagtatgatgagaaaatcaagcagacctttcagcgtatgtgcagcaaggcgagaaaggacgcggtgcagattgcggcaagccatatctatgtggccggtggcagccagacggattccgagcggccgatcgaagtcggaggcgcatatacggtcgctgcggaaagcctgccggaaaacgccgcatatgtggcgctcgggcatcttcatcgcccgcagacgatcaaaagggctcgcacgcttgccagatattcaggctcaccgcttgcctacagcttttccgaagcgggatacgcaaaatcagtcaccattgtcgaagccgcacccggtcaaacggcatcatgggaagaggtccatttgacgagtggaaaaccgctcgtcaaatggaaggcggaaaaagggatgtcccaagtgtacagctggctggaggaagagcgggataaaaacgcgtggatcgatcttgaaatccatctgacagaccagctgtcgattgaagagattcaccgattgagaaaagcgcgtcaaggcatcatccatatacgtccggtttttgaggaagccgcatcggctgaagagaagacccggtccagaaacgttccgattgaagaacggtttaaagcgttttatgaaagacaaaccggcggagcggttcccgatgaggaaaccgtcaagctgtttctggaactcgcctcaggatcggaacaggaagagggggatgaaacatgaagccgatttctctgtctattaagggcctgcacagtttcaggcaggagcaggtgatcgattttgagcgcctgtgcgatgccggtgtattcggcatcttcgggccgaccggaagcggcaagtcgtcgattcttgatgcgatgactcttgctttgtacgggaaagtggagcgggccgccaataatacgcacggcattttgaaccatgccgaagatgagcttgccgtatcgtttacgtttaagctgcagacaggccatgagacggcttataaagtggaacgggtctttaagcggacagacgccgtcaaggtcaaaacgtcgatatgccgctttattgaaatgaaagaggaacaaatcgtcctggccgataaagcgaatgaagtaaaccgaaaaatcgaagagctgctgggcttgacgatcgacgattttacaagggcagtcgtcctgccgcaaggaaaattcgccgaatttctttccttgaaaggagcggagcgaaggcagatgcttcagcgcctgttcaaccttgaacaatacggggacaggctcgtcaaaaaactaaagaaacaggcgcaaacagctcagtccagaaaaaacgagatgcttgccgagcaggctggattgggcgatgcgggggaagaggcgctgaagctggcggaacagcatctcgaagaagccgaaacccttttgcaaagcaagaggcgcgaacgagatgcggaagcgcagcgctttgcggagtaccaggaaatttggaatctgcagcaagaaaaagaaagctatctaaaaaaagaggcggagcttttaaagaaaaaggaacagatccgggaaaaagaaagccgcctgcatctcgctgaaacggcaaatacgctcaagccttatgcagacgcctttctggcagcgcgggaagatgccgagcgcgcacttcgggaagaaaaacaagcgcgggaacaattagaacaatacgaagagcttcataaaaaaacagagtgcgagtacgagaatttcaggcgtcataaaaatgaaaaagaaccggagcttctcaagcaagaagaacagctcaccgctttgaaggaaattgaaaacaagcggcttgccgcacaggcagaagctgagaaaaagcagcgggaacagcgcttgaaagaagaggaaatcaagcatgcggcagacgaactggccaaggtgaaaagcctgcttgaacgcgggacagccaagcaaaatcagctgaaagcggagctgaaatctgtccaggtatccagcgaagagcgcaaaaactgccggaaggccaatcagcttgcttttcacattcagcagcttaacagcgatgccgctttagaaaaaaaacggctcgatcagcaggaggcgctgatcaaagagctccggcaagaacagcaagcggtggatcagaaggtgaaggatgaaaccgaacgcatccaggcattgtttgccgctgtcgaacgagcgtatgcgctcgtttgcgaaacggacagatcgctctctgagaccgtccgtctcgcgactcaaaagaaagaagagattgtcgcaaaacggaaacaggcaaaccgtgatcagctggcaatcgaactggcaaagcagctcaaagagggtgagccttgtccggtctgcgggtctgtacatcatgaaatgcccgcgggtgacggtacggaaagcccgtcctttaaagagacggaatccgaactggagaaaacggaagccatcatcgcagaagccggcgcgctggctcaggagtttctctcagccaaagtggcgctcgaacagcagtccggccacctgatgagcgaatgcccgtttttagtcaaaagcaaacacgaactgcctgaaactgctgcatcgctagaagaaggcaccattcccgaacggttcagccgcatcagctttgaatggaaaggaatcagacaggatctcgccgagacaaaaagccggatgtccaagctccttcacacatataaagagctctgcaaaaaacgcgaccaaatcagcgaacgcctcagccatgaagaaaaagagcaaaacaggcttcaaaaccgcgtccgcgaattgaatgacgagttaaatgaacgccaaaaaagtttcggcgaacaattcggcggcctctcttatgaacaggctgaaaaatggcaaaaaacgattgaagaaaaagatctggccgcagaggaattcgaaaagcgaatcgaaacgagcgtcgaatttctcacggaacatgaacagcaaaaagagaagctcaccgagcgcttgtttgcgcttgataaagaaaagcttgaccttcattatgcggtcgaaagcctcaaaaaagacataaacgattatcaaaaagagctgacgggctatcccgatacagctgcgatcgacgaaaagcttcaagacgtgaaaacgcagttggccaagctgcatgagcaggaacagacgctttacggacggctcaaggagaccgaatccgaagtcagccgtttaagaggacagacaaaagggtgtgagctcgctttgcgtgaagcggaagcaaggcttgcgaaagcggcggacatctggcaggaaaaagccggaggcacaccgttcgaaaaggcctctgaagtgaaagcgagcattttggaccgcgatgagctttcccggctgaaagaagacattcaactgtattgggatcacacaaagcagtgcgagtccaatatcaagcgaattacggaaaagcttgacggcagatctgtttctgaagagaattgggaaaaagccgcagtcacgaaggaccaggcggaggaggcattcagcaaagctctagaggaaaggggagcggccggcaaagctctcgccgtcatccgcgagaaccataaaaggtttaaggaacttgaagcatcattggctgaatggcagacatacatcgaccgtcttgataaactccaagccgtctttaaaggaaacagctttgttgaatacttggcagaagagcagcttgaaagcgtcacaagagacgcatctgcaagactcggcgaactgacaagacagaggtatgcgattgaagtcgactcagaaggcggctttgtgatgagggacgatgccaacggcggagtcaagcgccctgttacgagtctgtcaggcggggagacgtttctgacttcactggcgcttgcgcttgcactttcggcacagatccagcttcgcggagagtatccgctccaattcttctttttggacgaagggtttggcacgcttgatcaggatttgctggatacggtcgtgaccgcattggagaagcttcagtctgacaatctgtcggtcggtgtgatcagccacgttcaggaacttcgggccaggctgccgaagaagctgattgtccatccggctgaaccgagcggcaaaggcacagctgtatcgcttgaaatgatttaacctgataaccaaaaagcagccttcttctagtggaagaggctgctttatgcatttccgacaacattctggtcgcttacatccgggtctatataatttgtcgcgtttataccattgttgacgataaagaaatctccagtattaccagcaccagaaccgagtgcagactttgaagagctttttggagatagataaaaagaatcgccgaaattcactactcctcctgagatttcattgattttaatgggtccgacaatggctggcatgattgatcgacatcctttatagaagtctctgaaccagtatatgtcggccgggcggttattgtgagttccttgcaggaggaagctttctgatatgtttgactctcgagtcggcattgatgcggcgcgttgagccgacctgagcaacggaggatgatgatacaccgttgattttaatcgcccttacacggatgaaggggatctcatggaaaaaagccgagcatacgccggtttctgggagaagttgcgggatcggctgcctgaaaagctgaaaatcatcctgtttaaatgacccttcatttccgtaaaaaagagaaaggtatctttgaacggcgagaacttttgacttgagaaactgctcttccgtgtctccgatttgcagcgtgctgcttattccgacagagtgtacttttaaaaacttcactttggacgttctgagaatcatgattccggcgccagcgggacaaacggcccgacaatgagagattcaggcggtgtatcaaaaatcgatgacagagaaatgcaatccgtatcaccgaccagaaaaacagaagaagtggacacaccggtgatcacaatattgcctacatcaaaacagcggttcacaacggtaaaattcattcgttttcatttcctttcatttcgtcaggtattgatttgagaaagtgctcgattgcccgtgcgatatctcgtttgacatagtcggccagccgttctgcatgctcgcggggctggatgtttccgtcaggctttacatgtttgacgtagtagcggatacggctgtcgatttgctttctgatgtcttcgataatgtggtggcggtttgtatcgtccagtttgctgtcataccggtcttcaagctgttccagcaaacgaggggtctcttcgtttaaataggcatcgacaagctgtctcgtttgctgcatcagctggctgtcaagctcctgctgaagcattccgatacccggcggctgttggctgatttcaaagttttcgacattatccgggtccgcaggattgagtccgatatttagcgttccgtccaagcgttcaatttttagttgatcaaatttgtattcgatccgggtgccgggattttctttcagctggttcaactccgaatgcaatacggcaatctgactttcgagcctctggatttgcgcagcctgctgctgcaaatacacataccagttctgtggattgctttgtttcatgagattacacccccgtatatctatggtactgtaacagaaggagcgtgaagaggaacgagagtcggttgagtcccatctccaaaagcgtcgtcaaagacttcgccggttaccggaggtgcgggttctgtgtagcttccggtattgtacaggtgggcaagtgttttgattgaaccggcgcttccaatctgcaatacggaagagttgctgattccttcaactcttaaataattgatttgtattgtttgattgatataaaagttcatgccttcactccctacaggttgcctgcgaccggctgatcgattacatcgttgtcatatgtgttggtgatgctgttctggttgtatactctgagtccgtctccggtattgaagctgccggcacccgcaaatgttttaacttctgcataaggagaaatcgtgatgcagtctccgacatgaacaacgccgctcgtaccgacggcatttactttaaaagctccgacaatagctggcatgatggcacaccctttaattgatcaaacatttttttatgggctatacaccatatcctatgttgattaggcgcttttgtgattaaaaatgaggttcttccgtgagtgcagatcacatactggtgaaactaataagatgagaaaacgtatgaagaaggaaaacgtgcgataaggggagagacgtatgtattttcaattgaatccgatatcaatcgctgcagccctgctgttctttgcggccgcatatgcagtcggaataaaaaagcaaacctggatattgcgggggtttcgccgggaaagggtaagggatcaggataagctggcgaaaatcgctgggtatttctttttgaacagcggatttttgttatttttaaatggggttgtttacatcccgtatcaagagtcttttacaccttcagccattcttgcctacggtatttgcacgatgatttatgttcaaaaaacaatggccgaatagcccaagctgcgacccgaaatcaacggatgatgaaatggaggaggaaggaggccggcatcaggcgcagcttgcagtcggaggtcatgacgtgtggcggccttttctttcttccgcatgcacgcagttatcatccttttgcattctttgattcagcaagttgtccaattcctgactgcatcgaatggcctctttggagttgatgccgaacttttcggcagcttcaaataaggccagtctttttgcttcaattttattgttcatcatggcagtctccaactttcgatttgtattttgagtcggtaatttcaggtattcagcgcattgatgtccttgatattgctagtataccttattttgtgtaaaagggattttttttgccaatatgacaaaaaatgtgacatttttttcggaggacagcgacagtctattatcgggaaagctcgaaaagcaggaaccgcttcctctgatcgataaaatgaaaaatttgtttttgctcatcttcgagccggctgtatgtgacggttgtataaggatcatgttcaagaaaaggcgcgattgtctcgtgccagtttaccgcataccgcgaaagccggctgattgtaaattggcggtgcaagacatttttcattaaattaaagtattgggattgaaaagccgggatgtcgagcagccttgcagacagcgtattatagcctttcgccggaatccggttgtgctccatttcttccccgtgaatattccgtccccatgtcgcgtcataatcccatggaatgatttgaaacgtttttgtgcgaccgtttaaataaagcgcgtaattatggacaaagccgtcgatattttgggtgtagacggcgccgatgagccacagcaaatattgtttgacatcgagatagcgtttgatttctttttcaaatatgtcgtctttggcggtattgataaagtagataaactcctggaggtagtcatcgtggcggcttgaacccgtttttctttcgtatccctgcatgagattttgcttagcctttttattgaaggaactcagcagagaaaaattagcatcgtcatcaacggcataataaatggcccccctttctaaatttctcctctttaagaaatgatcgtcaacagattcgatttttaaatagatgccttcttttttttcattgatataaaggaaaacgtgtgatgctgctggcgcaaggacgccgatttgttcaaaaaaatgaaaggaaagcctgtttctgatgaaagacggatcatgatattccgcgttcaaatgaaacgcagccttttctttattgtccggatattgaatgaaataggattttttcgtcagtttgcgggtgtgggcccctctgtatgacactgcgacaggcgtctttgctgaaccggtcaagagcatgccgggaacggcttcatcactccagacgtcttttttcaactcaagcagatgcttcggatgaatgtgcagcctaaaggccggcaaggcagtggcactcatcatcatttcctcctttttcagctgacatatcatatgtgaaaaaaacctgtcccggaagcagaccgcctaagtttgaacaaaaacagtcatttgcctcagtacacttgtctttacggcgcgtatgataaatcaggacataaaaaaggaagaacaggaggttacaagatgagtggtgtccatgatcatgacattaaaaaggcagtagaccagctgaagagcgaaggcagagaccattatttagaccgggaacccgaagaatacgccggctcgggaaaagagcggcgtccgcataacatttgggatctttggtggggaataaagccggacagaagcaaaaaacatcataaaagcaagaagcatgacgactatgaaaagccggataaaagcaaaaagcctgacaaaagcaagaaacccgatgactgcaaaaagcctgacaaaagcaagaaacccgatgactgcaaaaagcctgacaaaagcaagaaaccagacgactgtaagaagcctgacaaaagcaaaaaacatcacgactgcaaaaaacgcgacaaatgcggccgcaaacgccccgaccatcatcgctgcaagaagactcaccatcataaaagaggcggctatgaaaccattacaaaatggtctgacggaaatctgaccgaggtcatctaccggaaaaaataagaaaagcggcttgctgcatggtgagccgccattttcttttccgggaaggaacgcccgggactttagaagcggttttctgaaagaggaaaggaattttcgtttttttagagaatatgtagaatagctttaaatcatactgcgggggaatatttatgaagtttgcgacagcaaagctgcacagccgtacatttgtagggcttgtcatggatgagaagataatggatttgcaaaaggcggaaaaaaagctgtttgagcttgaaacgatacctgaaacgcttatcgaatgcgtaagcgagggagagaagtttgtccgccatgtcgaacagctagtggaatggtcaaagaagaaaaacagcgaagagagcggttcgtatatttatccgctgtcagacgtcgatttgcttgcaccgattcccgaaccgcggaaaaatgtgatctgcatcggaaaaaattatcgggatcatgcgattgaaatgggaagtgaagcagatattcccgaacatatcatggtgtttacaaaagcgccgacttcggtcatcggccacatggaagggattgatgcccacgaaggcgtgacagaggcgctcgattatgaaggcgagctcgcggttgtcatcggcaaaacgggaaaaaacatcccaaaagctgaagcgctcgactatgtgttcggctatacgatcattaacgatgtgacggcgcgcgatctgcaaaagaggcacaagcagttttttatcggcaaaagccttgatgcgacctgcccgatggggccgtttcttgtacataaatcaatgattgaagaccccggtgacctgaaggtggagacgagagtgaacggcgaactccgccagtcggggagcacaaaggacatgatttttccgattgcggaaatgatcgaaacgctgtccaaaggaatgacgcttgaagcgggggatattatcgcaaccggtacgccgtcaggagtcggcaaaggctttaatccgccgaagttcctccgaaaaggcgatcaggtcgacattacgatcgaaccgatcggaacgctttccaatccagttaaataaaggattgtcaaaaggatggctttagcatataatgaagctgtcaaattttttagaaatgagggatgtgtgatgagaatggatattgtcttttttgcccaacaaacgatcattgcacagcccatgtaatatttcgactggtattcttcaaatggatctggtgatatttccatgggctgtgaaccggctcatggagtgtttatatgttgaaagagccgtgtatttgcggttctttttttaatcaatcatcagatctttaggaggaaaccgaattgaatttatcagcattaggcatcaaatatatcatggaagctttaaaggatgaggaaggtctggttttgggaaggatcgcccttgagcataaaaggttgtaccgggtatggacggaagaaggtgagtggcttgccgaaatctccggcaggctgcggtttgaagtggaaagccgcggagactaccccgctgtcggcgattgggtgtatatgcgcccacgcggcggcgaaaagaagggaatcatcacggaggtcgttccccggttcagcaaattttcgcgcaaagcggcgggtgagccggcggaggaacagatcaccgcagcaaacgtcaatacgatctttctcgtcaatgcgctcggtctggattttaatgtgagaagaatcgaacgctacttgctgctggcatgggaaagcggagccaatcccgtcatcgtcttaagcaaagcggacattgctgaccggattgaagaaaaggtgcgccaggcggagtccgtggcattcggggtgccgattcacgtcatcagcgctcatgaaggcagtgggatggatgagctgaaagcgtatgtgaaacaaggggaaaccgtcgcccttttagggtcgtcaggcgtcggaaaatcaacgatcatcaacttttttctgaaggaagacaggcaagccgtccaatccgttcgtgaagatgatgacaaagggcggcatacgacgacgcacagggagatgtttatgctgcctgaaggcgggcttttaatcgatacgccggggatgcgggccttagagctttgggaatcggaagaaggattcaagcagagtttcagcgatattgaccagcttgcacaaaactgccgattttcagactgcctgcatcaaacagaacccgtctgctccgtgcgggaggcgctggctgacgggaggctggatgccggccggttccaaagctacctgaaattaaaaaaagagctcgaatacctcgaaagaaaaacggataaacgggcgatgcagcaggaaaaaaagcggtggaaacagataacgaaaagcatgaaaaagaacaaaaacaaataaatgaaaaaggcgctgataaatggcttcagcgtctttttgctgcggaaatgacagcgttcacattgttttgtttaatggaccggttcatgataagataagaacgatacctgatttgatagggggaaaaatgaatatgacgcatatgcatatcacgtcttgggtgatcgcgctcattttagtgttcgttgcttacgggctttactcatctggaaacagcaaaggcgcaaaaattacacatatgattctccgcttattctatattatcgttatcattaccggggcgcagcttttaaagttcacggcatggaacggagaatacatagcgaaggccttgctcggcctcatcaccatcggattcatggaaatgctattaatccgcaggaaaaacggaaaagcggccactgggatctggatcggctttattgtcgttctgctcttgacggttgtgcttggactccggcttccgctgggctttaaagtgttttaattaaatgacatcggttctttatgaggactggtgtcttttttatgtcggcggcttgaatgttgaaatcataacgattcgttccccatctgaagcggtccattcaaatctgtccttccactcctcttttctttcgtaatgatgctgcagggcgcattgtttcatatcatgagaaaactgataaaacgaaacgcccttgacatcctttttctcgggccaaaagctcaggccgttataggcgaagacgcagtcaaagacggaaaagccgaggctgttcagctgatccaaaaaagaatagaactgtccgtcttccagatcgttcaaaaattcgaggaatgcctgttttaccgttttcagataacggatcggttctcctcctgtcagcttcacggtctccggtttttccgttacggcgaattgatcaaacagttcggctttttgccattctccgtctatgctgatgaaaactccggggctgttcaggctttcaaccaaaagcaaatctccttcttcattttcaatcaggcagatcccgtcttccattaaaattttgccgtaaatccatttgcgcttttcggcataaagtcgtttctggcgttcggtgtccatgggcggtctcctttcttatttcgttttttccaaaacgggcttgtctcatacaagactctgttggacaattcaactattattttaaggtgcataaaataggtaaagtgacaaaggaagtgaagcctaaagcagaggaagtacattagaattggagctgatcgacaatgtgtggaataacggggtgggtcgattttaagaagccgcttgtccgagagcagtcaatcatggagaagatgactgatacgctttcgaaaagaggacctgatgatacgaatatttggggaaagcgccatgttttattcggacataaacgcttggcagttgtggatctggaaggcggcagacagccgatgacccgcacacatcaaggatatgattatacgatttgctataatggcgagctctataatacggaggatttgcgaaaagagcttaggcggcgggggcatcaattcaagagccactcagatacagaggttttgcttcattcatacatggaatggaaagaggaatgcatcgacaggctgaacggaatttttgcatttgcggtatgggatgaaaagcgggatcttctttttgcggcacgcgaccggcttggtgttaaaccgttcttttacaccgaacagggctcatcatttttgttcggatctgaaatcaaagccatcctcgctcatcctgaagtgaaagcaaaggtagaccgttcagggctggcagaaattttcggcctcggcccgtcacgatcgccggggagcggtgtttttaaaggagtaaaggagatccgcccggggcatgcgatgattttctcaaaagacggtttaacggtttggcgctactggaatgtgaaaagcgagaagcatacggacagctttgacgaaacggtggaaaatgtgcggtcgctgtttcaggacgccgttacaaggcagcttgtgtctgatgtgccggtatgtacgtttttatctggaggggtcgattcgagcgccattaccgcaacggccgccaagcatttcgagagggaagggaaggcgccccttcatacgttttcgatcgattatgaagacaatgagcaatattttacgtcaagctcatttcagccaaacgccgacggcccgtggattaaaaaaatgtccgatgcattcggaacggttcatcacaattgcgtgatatcccaggaggagctggctgcctatttggaagaagccgtactggttcgggatttgccggggatggctgatgtcgattcttccctgctatggttctgccgcgagattaaaaaagactttgtcgtgagcctttcaggggaatgcgcggacgaaattttcggcggctatccttggttccattcggcagaagatgtgaaaggtttcccatggatgagatcaatggaagaacggatcggacttctgcaggacggctggcagaaaaagctgaacctcagcgaatatgtgaaggcaaaatatgaggaaacagttaaagaaacaccgctgctggaaggagaaacgggtgcggagaaacgaaggagagagctgttttacttaaatatgctctggtttatgacaacgctcttggatcgaaaagacagaatgagcatgggtgcgagcctcgaggtcagggttccgtttgcagatcacaggcttgtcgagtatgtctggaatattccatgggatgtcaaaatgcatggcagccgtgaaaaaggcatcttccgcaaggcgctggaaggcattttgcctgatgaagtgctgtaccgcaaaaaaagcccatatccgaaaacgcaccacccggcctatacgaaagccgtgatacgctggctggagtcattgctggagcaaaaagactcggcgctctatgctttcttagaaaagaaaaaactggagcggctgattgagacggaaggtgcatcatttcaagttccgtggtacggacaattgatgaagggaccgcagctgatcgcccaccttgcccaaatccatacttggtttgaaagttatcgaattgatatcgaggaataacataaaacacccggcatatgccgggtgttctgcgttttggcagctaagctataaagaaacggcggcgtttattttgaacaccgccgatttctatgatcagcaagccggcctgagagccggatgcatgagagtcacacctgttcagttttggaagaaggtccaggctttaaattgttgagccgtgagacaagatccgttccgaaagcggagcttacgtcaacatcgtcctgatcgatgtagctttctttatactcgtacgcggaagaaccgtgttcggcataatctagtccggaaatttcctcctcttttgataccctgatcggagcgagggctttcattgccgcggcgacagctgatgtggcagcgagggtccaggccgcgatcgacaaaatgccgacggcttgaatgccaagctgtgcggctcctcctccgtaaaagagaccgctcgatgtattgaaaagcccgactgcaagcgtcccccaaacaccgcaaataccgtgaacggcaatggcgccgacgggatcgtcaagcttcagcacctggtcgataaactgaacgccgacaactaaaatgacaccggcgatgaatccgatcaatatcgagcctgtaaatgaaacgccgtccgcgcccgcggtaattccgacaaggccgcctagcgcgccgttcagcgtcagggaaggatcgatcctgccgtagcggaaataagtgaacagcgccgagctgacgactccgcccgatgccgctaaaagggttgtggtgatgacgtgcgggacggcggcgggatcagccgcaagcgtgcttccgccgttgaacccaaaccagccgaaccacaggataaagacgccgagagcgcccagcggaatgctgtgccctggaatggcgttgaccttgccgtttgtatattttccgatccgcggcccgagaaacatgacagccgcaactgcgcccgcagcgcctgtcaagtgaacgattgaagatccggcaaaatcgacaaatccgaggtcgtacagccagccttccccccaagtccaatggccgacaaccggatagatgagaccggtcataaacagcgtcaagatcatgtagctgccaagcttcatccgttcagcgacagcgccggaaataatggtggcgcacgtagcggcaaacacggcctgaaagacgaaaaatccgacatcctgatcacccgctagagcaaaaccgcttgtgccgatgaacccgccggcgctgtccccgaacatgaacgcgtatccggcgaagaaataaaggatggagccgatagagatcgtcaggaagtttttcattaaaatgtttaacgtgtttttagctcttgtaaagcctgattcaaccatcgcaaaaccggcgtgcataaaaaagacgagcagagtgccgatggctacccatgtcatgttgaccgagtcattgaccgattgcaccgtcggttcggcggccagagctgatgcggtgaagaaaaaactgaggagcaggacggcagataccttggttttcataagaatcaccctttcttaaagtatcgactaaaagagagcaggagggaatcggtcgttttagacaatcgcttcctttcctgattcccctgtccggattcggatcgcgttttcaattggaaggacaaagatttttccgtcgccgaccgtatttgtcgaacatgtgctttcgatgattttgataatttcatcaacgctctccgattcaatcaccatttcgactttcactttaggcagcagcttgatttcgtaggaggtgccgcgaaacagagcctgcttcccccgctgctggccgcagccggcaacctctgagacggttaatccgtttatgccaacctcttcaagctttttgcggaggcgagggaactgttcggggcgtataatcgtttcgatttttttcacaatgcaaatcctccttttggtgtaaggttatcttacgtgtgttgttatgtttcttatcatacgtaaaattaaattgaaaatcaatacgaattttcaaaaaaattaatctattagacctattctttgagaggtctgtgttcatagaatggcagtctcgttaagttttataacatgaaaaaacctgctttcaactgaaagcaggttatgctgcaaatcctttttgaagccacattttagatctccatcttctgtacattaaaattcccctgacccattcgtcggcgatgaaggaaaaccaaattcccgccaggccgaatccgagctgaatgccgaaaatgtaagcgatcggaagtccgattccccacatcgagacaatcgccatataaaccggatatttcgcgtctcccgcagctctgagagaattaatgatgaccacgttaaacgagcggccgggctccaagataatcgtcaaaaggatcagtatactggccgttgcgataatatcgggattgctgctgaaaatgccgatcagctgttttgaaaacacagcgaagagaacggaagtaaatgttgtaatggccagagcccaccacaggcttttcaggcagcggctgtatgcttcatcaaattgcttcgcgccgatatggcgtccgattaagatttgcgttccctggctgatcgctgtgccgaaaagcatgataaacatcatcaaattttgggtatagacttttgttgtcagcgcctgcgcgcccatcagcgtgataaaataggtgacaatcatctgtgacgcgttatatgacagctgctcccctgctgaaggaatcccgattttcagcagttttttcaggtgacttttctttaagacaaacagccgtttggacaacagcggcatgccgacgcgctttttgacgagcagagcgatcgccaaaaggccgatgatgcgcgcgattgaagtggacattgccacgccggccacgcctaaaaccggaaagccgaacggtccgaatatgacaagatagttgccggcgatgttcaggatattcatgccgatggttacaaccattgtgtcctttgtatacccgtagcttttcaaaatggcgctgaacgtcataatgagcgcttggacaaaggacagtccgccgacgatctggagaaagatgccggcttcagcaagcaggttggcggaaaggcccatcatcaataaaagcggtttggcaaatatataaatcgccgcactgatgaatagactgatgataaaattggcgctgatggaaacatagccgacttccattgcttcggctttttgccgcgaccctaaaaattgagaaataatcacggttgttcctgttgcgataaaaccgaacatcacaatgatcaagttcagcatttggttgctgacgccgacggctgccacgctgtcgtcggaatattggctgagcatcagggtatctgcgttgcccattaacatatataatgaaacctcgataaagataggccaagtcaatgcgaataaagagaggttttgaggtgctgtttttttcatggcgtttgacccctttcttttaaaattccgttttatagtgtaacgccattttcttataataagaagagacgaaaccgatacttcttggagaaatccgacttgatgaaaaaggggagagaacatggaacatatcatctttacaattccgccgctccctgtgttgattaccggcggagaagggctgttcaaaagaggggaaaagcatgtgaggcgtgaatattccgtgtttgatctcttatatgtgatacagggggaactatttttgactgaggacggcgagccccatcagatccgggaaggggaatacatcatccttattccggggctcgagcattatggccaccgcggctgtcaagacgatacccgctatttttggctgcactttcaggagccgtcctatggcttcgcgcagcagggaggtgagaactggactgaactcaagctgaggaaggggacatttgaaacgccgacattgtatcatttaaagattccgagaaagggaaagatcgaccaaaaagcgtttatcgaacagcagtttaggcgtttgattgacgattcctcccaaaattccgacctgtcgcttcgcaggcagctcttgttcgaagagctgctgattcacttgcagaaggaggcgttccatattccttcggcgagtgagcgtgtagcatccgaagcacagcattacatcgaccgccattataaggagaagctcagcatggagcagctctcggctgcccttcattatcaccaggactacattacccgctgcatgcaaaaggtgtttggcatcacaccgggccaatatgccaataaggcgaaagtttttgaagcgaagcggctcctctcttctacaaacgacaaaatgtcatcgattgccgaacaagtcggaatcgatgatccgacctatttctcaaagctgtttaaacaaatagaagggatttcgcccgttgaatacagaaagatgatgaagcgaaatattgagtgatattttcaaagcataggaggagataagtttggcatccatcaatggtgaaaaagtgaaattgcgtacgatcacaatggatgacctgcccggattatggagaatgatttacggaactaaaaaccctgaatggaaaaaatgggatgccccttattttccgcttcagcccgaaccgtttcaatattttatcgattcttttgtgccggctttaaaagaaaaaccgccgcgctatttggcgatagagatcggcggagagctgaaaggaaccgtttcttactattgggaatcccggccgacacgctggctggaatgcgggatcggcatctatgatccgcggttttggaacgggggatacggtacggaagccgtagaattatggatcggcttcctgtttgaaaacgtcgatgtgccgagaatctgaatgacgacgtggtcaggcaacaggcggatgatgaggtgcgccgaaaaagccggatttaagatggaaggccggattcgcaaagtcagatattatgacggagtctattacgattcaatcagatacggaatcctgcgggaggagtgggagctgatttgccgcggaagctgacacgctctataatataatattagaaatctttcatcagcggactagaggggaccaatatgaaaaaaaccatttatgatgtagcggaagcggccggcgtttcgatttccacggtttcccgggtgatcaacaataccgggaggatcagcaggtcgacaaggcaaagagtgcatgccgtcatgaaagagctcgattaccagccgaatgttcacgcttctgcgcttaccggaaagcgcacgaacattatcggcctgttgacgcccgatattgcaaacccgtttttcggcgagcttgccaaaagtgttgaagagcgggcgggcgagctcggcttcagcattatgatgtgcagtaccgaccgcgatccgaaaaaggagacaacgtatttctcggtcttcaagcaaaaaagcgtcgacggcatcatttttgcgacaggcatcgaaaatcaggagacgatggatgcgctcgaggatattgccaaagagggcataccgctcgtgatgatttcccaggatcgcgcccttgttccgatggatgtcgtggtcatcgatgattttatgggcggatatttagcgacgcggcatttaatttcgctcggtcataagacaatcgcctgcatcgccggcgacggatcgacaaccggagaaaaagacaggctgaaaggcttcaaaaaagcgatggatgaagcaggcatcaaagcggatgaaacgctcatcgccggatccggtttttccctggaatgcggcaaaaaagcggccgctcagattttcaaaagcaatattccgaccgccgtttttgccatgaatgatgtgctcgcgtgcggagtcattcagactgcaagggaatgggggctccatgttccaacggatttatcggtcatcggctttgataatacgtttttagccgaaatgaccgatccgccgcttacgacagtgtctcagccgattgaagaaatgggccgccgcgcggccgagctgcttgccgaagaaatcagcggcaagaaaagctcgaaaagcaaaatcattctcacgcctgaacttgtcgtcagacagtcgacggcccctccatttaaaaaagaagcacatgccgaaaagagcgggttttgatagaaaaacgctcttttttcgtttctaaagagcaagcgcttgaccaaattaattcctaaaaaacaattgcggataaaataaatacagggtaaaatcagaattgaaatgagcaagcgctttctctaattaataaagcgctttcatgaaacgcaaaggaggagaagaaaatgacagaagttgtgagatgcgccgtattggggcttggaaggctcggctattaccatgcgaaaaacctcaaaaccgaggtgcccggagtcctgctcgccgctgtagccgatccggcagagggaagtgcgagggaggttgcagctgaactgggtgttgaaaagtggttgaagacccgtttgagtgcctccgcgaatccggaaattgatgccgttgtcatcgttacaccgacatccactcatgccgaaatgatcaaacaggcagccgaattcggcaaacagatttttgtggagaagccgctgacattaaatcttgaagagtcaatagaagtcatttccaaggtcaaagaaatgggcgtgatttgccaggtggggtttatgaggcggtttgatcctgcttatgcggatgccaaaagaaggatcgatgccggagagatcggcaaaccgatctattataaagggtttacgcgcgattttggctctcctccggccgaattcatcaaaaaaagcggcggtattttcgtcgattgttcgattcatgactatgacatcgctcgttatttaatgggggctgaaatcactgcggtttccggccacggaagggttttgaagcacgcattcatgccgggatgccatgacgtcgatcaggcgctcacctatatggagtttgattcgggagcggcgggtgatgcggaagcaagccgcaattcgtcttacggccacgatatccgcgccgaaatcatcggaacggacggcagcatcttcatcgggatgctgcggaacccggcggttacagtgcggaccggaaaggggagcagctataatatcattcccgatttccaggcgaggttccatgaagcgtactgtttggagctgcagcattttgctgattgtgttcgcatcaaaacgaaaccgcttgtgtctgaagtggatgcggcggtcaatcttgaaatcgcgcttgcggccacacaatcctggtcaacaggcaggcccgtcaagattcagtatcagacgaaaaagcttacggtatgaaacgggggccaccctgagcgggctgttgagatgatcctgcggtcacaaaggaacaacaggaaggagggcgtaaggaagcgttccccgcccggtgccgcctttctccatgcgttttcaatcaagcgccgccctactgcgtattcacaaccggtctcagattcagctggtagtccaccttaacatccatgttctcccaacgcttcagccacgctttgtcgctcatcggctttgtaaacggaaacagcgcttcgccgccgacttcaagcggatcaacccgaatgttttgcatgtccttgatcatgtccgctgttttcttttccaattcagattctacatcatggacgagtgcgttgaattcgctttgatcctgcaggtttttatcgcctgtatattcttcaattcccgcgtttaggctgaccttcattgataaagccgtattgttttgattcaagtcgaacgtgacggttgagcgtgcctggccgatcacgattgacaagttggggatcgtgaggaacttcaggaacctgttattgttgatcagctgaaaaatttgatcgtctatgccggtcaggaccttcacgaatttgtcgtttcggaaaagtcctgttccttcatatgtgaactggtttccatcggttctgaaaacaggcacgtatggatctgaaaagtgggtgtacagctggtttttgaattgatgcaggttgacgatgctcatttcaccctggtttgctctttcaaaatgccttaacgtctgataaagataaaagtcaaaattctcgctttgcttcaattcgctcattatatatttgtcaaaatcgcctttgacgacgatcagataaaggcgggggccgattttcgggtctgacaggagcgtgttgataatcggaagtatgcctttgtcggcgagattttcttcgatcatcaccattctcagctgcccgtttttcagctcgttgtaataatttaagttaaagcgctttccagcttgtttaatcatatcgacttcggtgctgaacagcctctttttttcaagacccatcggagggacgacagtgctcatcgagatctttcctttttttccttctttcatgtaccaaaaggtaaccggtgagatttcttcaatctcattgttttcgacaaatggagagcagcccgcaaccgctgtgaaaatcccgagtacgagacagcactttaatttgatgcgttttccgctgatcattctatgcgcccctttcgttttccggcgaaaacaagaagagccggaatcaatgcataggtggcggctccgatggatacttcgatcaaaaaccacatattctgctcctttccggattgccaaaaccaggtgctcataatgagcgaacatcccatgatcagaaggaagctgaacagaaatcctcttcgcgtcaccggtttggacacccttttaaataaaatgcggaggccgccgtaaaagcagagcaaaaaaattgcgatcacaaacgcaaaatgaaacatatgggcagacagaagaaacgtatcgatccgctccaaaatcggcgactgcaaatagcggagcatgttcatcaccggaaaaacggtttcccgcaaataagaggagccgtagaaaaacagtgcaccgataaacaaaaacaagtattcgaagagtgaaatcgcattaccgaccgataaacatttcagcacatttgcttccttgctgaaccacggagccagacaaatcaaatactcgggactggaaaaagaagaccacatgacgagcagtgccttccaagaatgttcagtccattcaaaaggaatcagcgggtataaatcagtcaaggaagcgatcgggggtatataaaatctgataaaaaggaacaccatccatccaaaatgatgacataaaggcaataatgacaaagcgcatcgtattttccatgcctcgggaggcagcatacccgctgataaccagaataaagatcacgagccagttgatattgatcgcgggaaagatgaaatgtctcactgtttcggcgtagcttgtgatcatgatcgcgatctttagcgcgagctgaattaagccgatcagaataaaaaatcgcagcttgcgttcgccgaagagggcggcgaagccttcgtagcctttagcagcagctggagaagacagccatttggacaacaggtacaggttgagctgggacagcattccgacaccgagcataacgaacatcatgtaagggtgaaccaaatacatcggtagaaccaatatgaaaaaaaggacttgcatacggttggcgataagggcgatgtaaatgccgccgagaggacgtgtcttgtgaaataattgaaaagaactcaagccgcttcatctcctttttacgtaccgccatttttgcagaggatgcagatattcgggacgctttttcagccaaatcaaaggacttcgtataaaaagatcaagccaatcgcgccaatataaaggagtaatcggtgcaaaatagggctgcttcagagaagtgagcccgttcaaatgaacaaacagtccgatcattccgaaggtcaatccgaaaaaaccgaggcaggcggagaatacaagcatcgtaaaatgaatcatagtgtgtcctttagcgacgatgtagttgggcaccaaaaatgacgcgaccgttgagatgccgaccaaaacgatcagcactttgctgacaaagccggcctgcaccgctgcttccccaatgacaatccccgagatgacacccaatgttgaacttgattttgtcggcatccgcacgctggcttccttgataatttcgatgacgagcagcataaggaccgcttcccaaaacgggctgaacggcactttgctccttgattcgatcagcacgtaaagaatctggagcggaaacatatgataatgatgagtcgacaaggcgacatacaaaggtattaacaaaatagacagaaaaaaactggcgtagcgcagcattctaaaaaagctggcaaccggccagcgcgtcgtataatcttcggcggagtgaaaaaggtgaaaaaacgtgatcggcgcatgtaatacaaacggcgtctggtcgaccaaaatggcgattttgccaatgcttaagttgtatgcggaaatgtcgggacgctcggtctgttggaactgcgggaaaatcgaatgatgatgatcttcaatcaattcagtgagctgtgcggaatcgaagatcatgtcaaaatcggtttccgcgattttttttctggcttcctcaatcaactctggattggttaatccggcaatataaacgatgacaacggatgttttgctgagcgacccgaccgtcagcctttccgcttttaaattggataaaggcagcctgcgccgcagcaaagaaagattgacgtcaagctgttcggtaaaactgtctttcggaccgtacattaccgtttcggtttgagacggttcgatctgccggccgacccgattttcagcaggaatggcaaaccactgctgctgagccggatcatggatgatgatcgaaccggacatcagccactcttttgcgctttccaaagatacgatcggttcaacgtgcaaaacaaaggtttttaaacagcgatatattgactcttcttcgccgctcgtgatcagaggcctgatgatcgactgctgcagcagcacccggtcaatgatcgtatgtaaatagtaaattactgctttttgtccgccttttgtttcatgctcttcgatcaccgcatcagccataccggcggtggcatcgagaagggcatctctcgtaatgggagcgctccgcaatccagctccctttcttttatattttcgaaacatggacatccctcatcagcgattgatcaatcccgggttaccggactttgtcgagatgtccttattgtgctcgctgcttctcaggtttatgcaggcagaacccgcgttccgcaggatcaagtaaacagcgaggcgccgaggtaggcggcaagcccccacatgacagccgcagatcctttattgaacaaggtcaggatgaacccttgcgaatcgagctgtttgagaagacttcccgctgcggcgagtcccaggaaccatagccacgaaaccatcatacatgcacaggtgaacagccaaagatcagcaccttcatatgctaaagagttcgtgccgatcacgccgacgatatcgagcaaggcgtgcggatttcagagcgacacggccgcagcaaaggcgatttgctttttggccggcatggcttcggacgcatttcccactgctggcttgcttctccaggtgatccatcccatataaatgagaaacagaactcctccggccaataggacaaatttaacttcgggaaggccggcgacagccgcggaaatacctgtgactgcaagtataatcaggagggaatcgcacaacgatgcggagatgacaagcggcataacccgccaaatgctcgatgatgcagccccttgctgaaaaatcaggacattttgcgcgccgagcggcaagatcagtccaaaagcgagaattattccgtgaatagctgcgttcattactgcaaaaacccctttctttcaaaacatccgttttattgtagagcaagaaacggggaatgtctccggccatttggctggtctggttacccagccaaatgctatcctttaaaaaaggagctgaacatgaagtgcacagacagctgaacagacattcagacattccgctatacaagcaaatcgaacaaatcataaaagagaagattttgcagggggaatggcccgccgggacgaaaatcccttcccaacgcaagctggcctccatgtttcaagtgaatagaagcacggtgactgcggctcttgacgagctgacagcccaagggcttcttgaagggaaccggggcggaggcacaaaggtggccaatcaaatatggtcagaattgacagcggggccgccgctggattggacgagttatgtacgctcggggattcaccgccccaattcaatgacggttcaggaaatcaacaggcaggagtttaaagaaggggtcatcagacttggcacaggtgaattggcgcctgaactgctgccctatcaacaaatggaaaagattcttcgcggagccgcatctgaaaggctgatgctcgggtatgaagaaccgaaaggaaaccgctttacaagagaagtgctggcggcgcatctgagccggaagggtgtgcgtgcatcggccgattccattctgatcgtctccggagcactccaggcgctgcagctcatatcgatcggccttttgaagcggagagccgtcgtgctgacggaaaagccgtcatacctatactcgctgcacgtttttcaatcgatggacatgcggctttgcgggcttcccatggatgccggaggattagacccgtccgtcattccggcggtaaaaaaacggcatggcgccgatttgttgtacacgattccgtcatttcacaatccgacgggcaaactgatgtccgaagaccggaagcgcgagctgattcaaatcagcaagcagctgtcgctcccggttattgaagatgacgcatacggcgatttgcagcttgacggcccgccgtcgtcgccgctgaaggccatggacagagaaggcagcattctttatgtcggcacattatcgaaaaccgtcagccccggcctccgcatcggctgggtcgcaggtccggagcccgtcatcgagaggctggccgatattaaaatgcagactgactacggatcaagttcattgtcgcaatgggcggctgcaaagtggctttcaagcgggctctatgatgaaaatctcagcccgattaaagtcgaactgagacaaaggcgggatgaagcgctccggtgtcttgagacctattgcagaggaatcgcccgctgggaaaagccctcaggcggattttacatttgggtcacattcctaaaaccgctctcgctcagcgctttgttcgaacaagcattacagaaaaacatcctcatcaatcccggcaccctctacgataaggaagccaaatacagcatcagattgtcctattcgtacgcctctttgacagagcttcgctacggcattcaaacaatcgcagaactcgccggtaagctcatgtgaaccccgctgtaccggctgctgaaaaagcgacgttcagcagccgctccgctttttatttcaggcctcaggttatttaaaaacagtccataaaattccattaatatatcattcaaggaactattgattcatattagcagatgaatgtgcagaagtggaaatattcaagttgcctcgttatgagaaacgtcctatttttctgaatcttattgacatgccggtgtcacaaaatatacactttttttgtcattgaaaatgataatctttatcaattggagggatgctttctatgcctgtacaaacgagttctaaaaatcaagtgtttttggagcagcaaaatagaagagaatctaatgcgcgttcatatccgagaagatttccgctcgccatgcagacagcggaaggcgtcttggtgactgatgcggatggaaagcaatattatgactgtctggcaggagcggggacgcttgcgcttggtcataatcatccagttgtgattgaagcgattcaaaaaatgattgaggaaaaacgcccgctgcacacccttgatattacttcggaaatcaaagaggagtttgtcaacgaagtatttgcaagccttcctgaggcgtttgccaaacgggcgaagatacagttttgcggtccgaccggcggcgatgcgatcgaagccgctctcaagcttgtcaaaacggcgactgggaaaagaaccatcctatcgtttcacggcgcctaccatggagcaactcacggaacgatggcgctgagcgggaatttatctcctaaggaaaacgtccagggtctcatgcctgatgtgcatttcctgccatatccgtatgaataccgctgcccgtttggaaaaggaggagaggcgagccacaagctgtcgagcgcatatatcgaaaatatgctggatgatccggaaagcggagttttacagcctgcagggatgatctttgaagccgtacaaggagaaggaggctcagttccggcccgggctgaatggataagagaaatgagaaggattacaaaagaacgcggaatccctctgatcattgacgaggtgcagaccggcatcggcagaaccggcaaaatgtttgcgttcgagcacgccggcattataccggatgtcatcgtcctttcaaaagcgatcggcggaagccttcctctgtctgtcgtcatctatgatcaagaccttgatcagtggggacccggggcgcacatcggcacattcagagggaatcagatggcgatggcggccggaagtgcaactttaaaatatataaaagagcacgatgtgctatcacatgtagaaaaggtcggagcgaagctcatgcgggaattgcaagacattcaggagcacgttcccgaaatcggcgatgtccggggacgagggctgatgatcggcgccgaaattgtcgcaccgcataaaaagcaaaacgcaaacggcagctatccggctgatgcggagcttgcaagcacgattcaaagaaaatgctttgaaaaaggactgatcgttgaaacgggaggccgccacggaagcgtgatccgcttcttgccgccgcttatcgtaacagaggcgcaaatcgacgatatcatcacgatcttcagagaggccgtctatgaagcagtcaagtaaacaaaaaaactttgattccctgtttatgcacaacggggaacaggggatcaaagcataccgtgacgcggtagagaccgctgtagagacgctttgggccgattggaagaataaatcgaagccctacagcgggaagatgccgaaagaattggatctcgaaatcaaaagcttgttttcgtttcaggaagcgggagaatcgcttgcggatgttcttgagcatctgaaagaagcctatttgccgcaccggattcatgttgaagatccaaaatgcgccgcacacctgcactgtccgccgctgatcccggcgcttgctgcagagatgctgatcagcgtgctgaatcagtcgatggattcgtttgatcaaagcggagcggcttcattgatcgaggaagaaatggtgcagtggctttgccgaaagtttgaatacggaaaagatgctgacggaacatttacgagcggagggacacagtctaattacatggggcttcttttggcccgcgatgccttctgcgaaaagcagtggaactggaatgtacagaaggacggactgccgccggaagcgaacaggctgcggatcctctgttcaaaggatgctcattttaccgtgaaaaagtcggcttcccagctcggcctcggagagcgcgccgtcgtgcttgtcgataccgatgctgaaaagcggatgagcctttacgatttaaagcaaaaaaccgctatgctgaaggaatcgggcttacatccatttgcgattgtcgcaacatgcggaacgacggacttcggaagcatcgatccgctttccgagcttgcggatgccgcgcatgctggcgggctttggttccacgttgatgccgcatatggcggagcgttgattttgagcaggacccgccgctataaattggctgggatcgacagggccgattcaatcagcgtcgacttccacaagcagttttatcagccggtcagctgcggcgcttttcttgtaaaagacagaagacatttccgcttgattgattatcatgccgattatttaaatcctgaggaggatgaagcggagggaatcgttcatctcgtcaataaatcgattcagacgacgcggcgctttgacgccttaaagctgtttgtctcgctgcgtgtgcttggagaagatacattcgccgagatgatcgactggacattcgcattggctgaagcggcagcggaaaaaatctcagcaagcgatcggttcgaactgctgaatccgcaccctgaactgaacgctgtcgtcttccgctgcctcgcctcagaagacgacgcggagaacgaccgtttgaataaatgtatccacagagaattgttcagaacgggacaggcggtgatcgcaaagacggcagcagctgggaaaacatatttaaaattcacgctgctgaatccgcggacgacgctttcggatcttgatgacattctcgggaggattcaagagcttgcaagtctttatacgaatagcaggagggtaacaggatgagttcatttaaagaaatagcagaaaacgccacgattcaaagctttttaaattgctatttgcgtgaaaccggcatcgaaacccgtgagatcgcggacggctctcaaaaaacgctgattgtcccgctagagcgccagcagatcgagctgatcgttccgatcaagtactggtcgaagacgggaaggcaccttttctcatttccgctttattatcaaacagcccaaaacggaaagccgcttccgctcgactatgtgacgctcgtctccctcgcttcaaaggaattgcttcttcagcaaagccgcgggggtgccgaggatgaattcatgctcagagtcattttgagctgccgaaatatcagccgttatgttgaggaacgagccgatgatcaaagtgagcttagccgtgctgattttacgtttatcgaagcggagcagtcgctcttgctcggccatctgatgcatccgacgccaaaaagcaggcaggggatgaagcctgaagaggaaagcatctattcgcctgaacttaaaggggagtttcagcttcattactttaaggcacacgcctccctcgttctgcacgactcaagtacaggaacaaaagcgccgctagtcattcaagaggaattgagaaacgacccgatgattgacaatgcgtggctggatgagcaaacggccgatccggattttgcgcttcttcccgcacatccgctccaggcgagagccttgttggaggagccgtatgtgcaaaaattgatcgctcaaggtctccttacatatctcggcgcaaaaggccggaagtatacggcgacatcctccgtccgcacggtctacagcaagcactcgcgctatatgtacaaattttcggtaccgatcaaaatcacgaattcgctgcgtgtgaacaagcagaaagaattggacagaggtgttgaaatggcccggctgcttcagacagagctcggccaaaggttgaaacaggagtttccgggctttcgcgtcatcacagatcctgcttacatttccattcgaggagagaacggggagtccggctttgaagtcgtgatcagggagaatccgttttatgaagacgaccgttcggcatgtctgatcgccgggctttgccaagatcacgcctacgggaaagagtcgcggctgtgctctgtcatccgcgggctggctttagaagaagggcggacgacggaagaagtgagcatcgattggtttgacaaatacttatcgatttcgcttgagccagttttatggctgtttgaaacatacgggctggcgattgaagcgcaccagcaaaacgccgtcatccgcttaaaaaacggctatccggagacattttactacagggacaaccaaggctattattacagcgaatcaaaagccgggattctttccaagctgatcgaaggcttgagcgaaaggagcgagacgatctgctcggacagcgtggctgtagagagactgcgctattatttcttcttcaaccatttgtttgggcttgtaaacgggtttggctgcgaagggctgatcggggaagaaacgcccctgtccatgatcagagagcggcttgaaaaagcggagcaaatttacggtatcacagagctgacggacagcctccttcgttttgcggagcttccgtgcaaggccaatctgctgacgagattttacgacatggatgagctgacaggctcgcttgaaacccagtctcgctatacgtctgtcaacaatccgcttttaaaggaggcggcggctgtccaatgaatgaacggatcacatttcaaaaagcggactatgaaagagacatatcgctcgtctaccgctggatgcaggaggagcatgtcattccgttttggcatttaaacatgccgtttgcaaaatttgaagcccattttcacaaggccatcacagaccctcaccaaacgctgtacatcggctttatcgacggtgtgccgatgagctactgggagtcgtactgggtcaagggagacatcattgaacaccactatgacaatgaaccttttgaccagggcatccacctgttgatcggtgaaaaagcgcatttgggtaaaggtcttgcccttccgctattaaaagcgatggtcaacatgcaatttgccgtgcctgaaacaaaaaaggtgatcgcagagccggatatccgcaacaaaaaaatgattcatgtttttgaaaaatgcgggtttcgccctattaaacctgtgaatctccctgataaaaccggattattgatcttttgcgaacgagaacgtttttttgaaaaggagaaaaaagatgaactctacaaagagacccaatgatgtatacgatgtcatcggcgtcggcatcgggccgtttaatctcggccttgccgcattggctgactccgtgcctgagatcaatgcgctgttttttgaacggaacgaaagctttaactggcatcccggcatgctgattgaaggaacgacactgcaggtgccgtttttggccgacttggtgagcatggccgatgtgacaagcaaatacagctttttaaactatcttcagcagcataaccgtctttattctttttattttctggaagactttcatattccgagacaggaatacaaccactactgccgctgggtggcagaacagctcgactcgtgccgcttcgggatgaatgtcgaaagcatatcactcgttgaatcgaacccggaggcgctttttaaggtgcgggtcgcgaatcgggagaacggaggggaagcggtttattacacgaggcatattgcgcttggcattgggacgggcccgcacgttcccgatgcgctctcagacgctttggggggctcggtgttccattcagccgagtatttaaagagaaagcccggcggatttaaagggaaaagggtggccgtcgtcggctccgggcaaagcgcagccgaagtgttttatgacctggtcggtgaagatgaagcggagcatgtcagctggctcacccgctcaaaaggcttcttcccaatggaatattcgaacctcggactcgaatatttttcgcctgactatatcgattttttctatcagcttccgcagtggaaaaaagatgaattgctaacgcagcaggatcttctttataaaggaatcagcgcgaagacgatcagcgatatttatcatcttctgtatgagcggacctgcggggggcggaaagcggcttttgatcttcagtccatgacagaagtcgagcagatcgaacagcgtggggaaacgctggttctatactgcacaaaccgggtgaatgaagaccggtttgagcggcaggcagatgtggtcgttctggcgacgggctataaagagaggctgccggaatgtctggcgcctgttgacagtttgattgaaaaggacgcgagcggccgctacgtgattacacgcgactacagactagtgacagctgcaaaatcaaaaaaccatatttttattcaaaacggagagctgcacacgcacggtgtcggtgcacctgacctgggactcggcgcttaccggaactcggtgatcatcaatcagctggccgggagagaagtatacaccgtcagccataaaacggtttttcagacattcggaacaggaatcgcggaaaaaacagctgtaccaaacggctaataaaggaggcattttcatgttgtttcaagatgaattaaagagggtcctcgatcctgacaggtggagagaagtcaatcggcgattgctggcgaagatgctttctgaatatatgtatgaggatatcattaagcccgatttcattgaaactgaagacggcatcaaccgctatgagctgagaacggccgaggataaggtgtaccggtttgccgccaaaccacgcatgttcgacagttttgacgcggtgccggagacgattgaagtcttcaagggcggacaatggacaaaacatgtgagcgcgattgaatttctcctggatattcagccgcatatcccgatgagtccggagacagcgggtcatttgatcaaggagttcaaccatacgatgctggctgatgcccaccttttggcaaaggatgcgcttacggctgacgagctgaccgaagccgattatgccgtaattgaaggcgagatgaccggccatccgtggatcgtctacaacaaaggaagaatcggttttggctatgatgactacctccggtttgccccggaaaatcagagagccaaacggctgctgtggatcgctgtacacaaagataccgcgtcatttcactcggttgaagggctcgattatgagacgctgattcataaagagcttgatgagctgactttaaggcaattcgctaaagtcatagaaaagcagggcgcagccagtgaagactattattatatgcccgtccacgaatggcagtggacaaatacgatcattcagcagtttcctgaagaaattgcttcaaaagcgatcattcctttaggggaaggcggagacgagtacctgccgcagcaatcgattaggacctttacaaacatcacaaacaaacacaagcatcatattaaactgccgatgagcattttaaatacgcttgtatacagaggcctgccgtcggaacgtacggtgatcgcgccgaaaatcactgagcatatcaaagggatcgccgaaaacgacgcatttctaaaagacgaatgccgggtgatcctgccaggcgaaaatgccagtctgaacgttgaccaccaatactatcactctcttgaaaaagccccgtatcaatatttggaaatgctcggcgctattttcagagaaagcatttatacgtatttggaagaaggagaacggcctgttacgctcgcttctttaacatacattgatcaaggcggcgtgccgtttatcaggcgcctgatcgaaaagtcggggctgtcagcggaggagtggatcggaaagctgtttgacaccgtgatgccgccgcttctgcatttcatgtaccgctacggaaccgtattttcaccgcacggacaaaatacgattctcgtcttaaaagatcatcagccgcacaggctggcgattaaagattttgttgatgacgtcaatatcagcgaccagccgcttcctgaactgagcggtttgacaggggatttaaaagccgttctcagaagcgagccgccggaagggcttgtgcagtttatctttaccgggcttttcatttgccatttgcgctatgtagccaacattttagaaaatgacggtctgcttcctgaaaagcgtctgtggaaagctctggctgatgcgattcttgattatcagcaaaaattccctgaactgcgtgagcgcttcgaattgttcgacttattcaagccggaattgacgaagctctgcctcaacagaaaccggatggtcgactacggctacaaggacggcgatgaccgcccgcacgcctccgaattcggaaaagtgacaaatgcgcttgcgaaatttaaaaaagaggccgcaaagctgtaatgctaatgcggccgagaatgccccgcttccggcggggtttttttacgtcaatttcttatacatcaaaatatgaggtccgatcggcggtatgtcgtagacttcgccctgttcgctgaagccgagcttttcatagtagccgctcacagatgtcctggcattgcaccataaaaggtctgccccctttttccgaagaagctcttcggcatggcggatgagcgtgcttcccgctttttgctcacggtatccttcaagcgtcgccatccctctcagctgatactgttcttcgccttcaagctctgaatgttcggctttatgaaaggaagcgatgctgatcagcttgccccggtaatatccaccgaggtgaaacgcacccccgagcaaatcggtttcatacatacatgcttcaagcggctgattcggccggagaatgcggtgcctgatctcatacgtatcttccgcgtttattggtttgacttcaatcatatgattcctccttcagttgcagatcagatgagagcgatcgattttcagcatgctgtgatgttattccattatatataacgcttgtggaaacaatcaaagcaggatgatcatcaccccctgatctgtttaaagaatcatttcccccgggaggcggtccctaatccctatatcgtaaatggcggaatatatcgtccatccacatcggtaaactgatattctttggctaaatcaccaactcttaacgcacgtccgcttttctccatcacatccggatccttagccaatgctgtgattccgcgtccgacataataaggcgtttcggttctccttaaatcttccgactcccgccaatgcgcctcatctgattcatggtatttcagcacaagttcggttctcataaatcccggcgaaacggcaataacggcaatgttgtcccgttttaattccaatgaaagaccgtacgccatgcggacgattgcgttcttggccaaatcgtaataaaactgtccggtgtacttgttctcatcccagaaggtcgtgtgaatgataagagcttgtttattttcgcgaaggagcggcacggcgaagtggtttgtcgccagctgggcacgcaccccggcggcgaacatcgtatcccaatttttcaatgacaattcccaaaaaggctttgcctcgacacccagatcgtgcgccccccacacattgttgatcaaaatatccagttttccttgctcttcgcgaattttagcgatgacagcctctgtttctgcatcgttcgtatgatcacatcttacagcaatagcctttccgccggaagcttcaatttgtgacacggtgtcatcaattgtaccgggccattgattcgtggaagcccctctgatgctgcggcctgtaatatacacggttgcaccggcttttccaagttctgcagcgatggcgcggcccgcgcctctgcttccgcctgttacgagggcgatttttcctttcagcggcttcattcatcccattcctttcatttaaaaagatatgttcattataaaagctcaatcttgacaaccattgtcatattttattaaataagttcattcattgataagaaaggtggtcatatgagaggggatcgactgatatctattcttttaatgcttcaggcacaagggcaaatgacggcgaaagaattagcggaaaggctggaagtctccgagcgcacgatttacagggatatggaagctttaagcggagcggggattcctgttgtggccgaacgcggcataaacggaggctggtcattgcttgatgattaccaaaccactctaaccggcttaaaagaatctgaaatacgcgcactatttgttccgctttctgaacaattgcttgacgatctcggattaacccgcatatccgaagaagcccgaaataaactgattgcctcgctgccttcggaatatcgccaaaacgcaaaggatgtatggaaccgcatatatattgatacctgttcatggcgccataagaaagaaaaagcagaatcctttgaagtgctgaaagatgccatatggaaagatcaaaaattaaaaattgtctatcagcgggcagatggacaaacggctgatcgtgttgttgcaccgcttgggctggtggctaaaggggcgaactggtatctgattgcatctaaagaaaatggggagattcggaattacagggcttcacggattcaatctgccgtttttgtccgcgaaacgtttgataggcccgaaaattttgatattgctcacgtgtggcggtcttcaacaaaggaatttattgaaaggctgccgacgtatgaagtgcgggtgaaggcggcgcaggccatcttgccgaggctgtcgtttaccaatcattttgtgcggatcatcgaaacaaatgagatcgatcaggagggctggatccccgttacgctatcctttgatacggaagaagaagcaaaaaggtatatactcggattcgcagagcacatgaggatcattgaacctaaagaactgcacggaaagatacttaaaatggctgaatccatagttgcgcattataaaacctgaaagcggcaatgactttatgttaaagacatacatgataaaccctgccggccgcaaacggcaggcagggtcttcgtttaatgaacattgaaatatgtggcttccgggtgggagacaacgatcgctgatacggaagcttcgggctccatcatgaagccgtctgttaagtgaacgccgatgccttcgggctggatgagcctgaaaagcttttcctgatcttcaagattcggacaggccgggtatccgaaggaatagcgctgcccttggtatttcgcctgaaaacgctgttccatcgtgaagtcgggtgcatcagggaagccccagcggtcgcggataacctggtgcgtccgttcggcgagcccttcggccagctcaagagcaagcgcttgtaccgcatggcttttcaagtagtcgccttcctccttaaagcggttggcggcagctcttacatgcctgcccgccgttacggcaaagaacgagacataatcaagctctcccttcggtcggacgtaatcggaaatacagcggtacggaagcttttcctgccttggaaaaacaaacgtttcaaggatgctgtctttgttcactggatctaaaatatgaagcgaatccccgtcgctgtacgcagggaaaaattggtagacgaccgcgggatcgaaccagccgtgttcttttccgtctctcagcagctcgtcgatcagttctttcagctccagtgcttttggatgctgttcagccagtagttttttgactttccctttcaagccgagatgatggccgagcagcatttgttcattgacatacggcacaatataggaaaggtcgatgtttttcaaatagtgccgtttcaagtcttccggctgaaagaccggcgccttcggaacgtgcgcccgtttttcaagcatttcaattacggctttcgtctgctttttttccgcgacggcggcgggtgcagcggcttcttttttctcgagaaactgcgacgggtccgtccgcagctgattggcgagcgataggccgtccatggcgtccttcgcgtataaaaccggccctttatattcaggcgaaattttcatgttcgtgaattttcttgaaagcgcggctccgccgaccatgatcgggatggaaatatccgctttatcgagatccttcgccgtaacgaccatctgctgcgccgatttgacgagcaggccggacagaccgatgatgtcggggttctctttgcggatcgcctcaattaactcctgcggtgtcactttaatcccaagatcgactaccttgtagccgttgttgcttaaaatgatgtcgactaagtttttgccgatatcatggacatcgcctttaacggttgccaaaatgatctttcctttgccgctgtcgtctttcttttccatatattgttcgagaaaggaaacggcagctttcataacctctgccgactgcagaacttcagcgacgatcagttcattgttgttaaacagccgtccgacctctgccatgccgtccatgagcggaccgttgatcacgtcgagcggggtggcgaattttttcaacgcttgttcgagatcgggaatcaagccttcttttgtaccttcgattacgtattcggccaggcgctcttcgagggaaagggacgttttcggctgtttgtccgcttttttctttccacgatagaagtcagtgaaggatgcgagcgttttatcgtcggtatgaaacagaagtttttcagccatctcgacttcttctttaggaatggaagcaaaccgctcaagcttttctgtattgacgatcgcgtaatcgagcccagcctgtgttgcgtggtacaagaatacagcatttaagatttcccggccgacgggcggaagaccgaatgagacgttgctgacgccgagaatcgttaagcattcagggagctgctctttgatgaggcggatcccttcgatcgtttctttagctgagccgatgtattgttcatcgcccgttccgaccgggaagacgagcggatcgaatatgatatcgctggccggtattccgtatttttcggtgagcagctgatgcgaccggacggcgacggccagcttttttgccgcggtgactgccatcccctcttcatcgattgtgccgacgacgagtgcgcctccgaactgtttgacgagcggaaggatgtcagcgaaccgttcttcgccgtcttcaagattgatcgaattgatgatcgcttttccctgcgagtatttcagcgccttttcaattaccgttttgtccgtcgagtcgatgacaaacggggcttttacttttttcatcgctttttttaaaaagccttccatatcttccgcttcatcgcggtccgggtctgcgagacagatgtcgatgacatgggcgccgtttttcacttgggctctcgcgatttcggatgcttcctcaaatttatgctcggcgatgagccgcttgaattttctcgagccgatgacattggtccgctcaccgacaaaaaggggacgcattgtttcttcgtaaattaatccgtcgattcctgagacggtgtgcggctttgctcccgaaggaaccgtccgcggaggcagaagggctacttcatcggccagcgcttcaatatgggcgggcgtcgttccgcagcagccgccgacaatgttcagccagccttcttcagcaaacgccttgatttttttcgccagcgattgcggtgattcatggtattgcccctcctcatcggggaggccggcattcggatagcagctgacggccgtcctcgctagggaagaaagggtcctgatgtgatctgtcataaattccgggcctgtcgcgcaatttaaaccgacgctgaccggtttcatatgctcgagggagatatagaacgattcgatatcctggccggcaagcgtcgtgcccatcggttcgattgtgcctgacaccatgagcggaagggttttgccggttttttcgaaggcttgtctaatgccgataaagccggctttaacgttcagcatatcctggctcgtttcgaggagcaagaggtcggctccccccgtgatcagcgctcttgcctgttcctcgtagttatcgatcagttcgtcaaaggtggtgccgccggtgacggaaagggtttttgtcgtcggacccatcgcaccggcgacaaatctaggccattcaggagttgaaaacttttcggcggccgctttggcgagtttgactgaagcgaggttgacttcataggctcgatgcccgaggtcgtactcgtccagaacgagccgggtggctccgaacgtattggtctcgatgatatcggctttagcctcgagataggcttcgtggatgccctgaatgacatggggcgccgtaatgcttagaaattcattgcacccttcatatgcctcgcctccgaagtctgcggcggacaaaccggcgtcttggatcatcgttcccatcgcaccgtcaaggacgaggatttttttcttcagctggtcattgatgttagacatttgtcttctccttttctttctgatggatatatgccgtcagctcggcggttagatcggaccgcaaaaacggtgtgatcagataaatgccgttgaacaggtcgcacgccgcatcaagcagagagcgagcgatcgcgagcccttcctcggcctgtttttgtttgtcgtttcctgccagcgccatcttttcgcggattgaatcagacagcttgatgccggggatttcgttgtggatgaattccgcgttgcggctgctggtgagcggcatgacgccgatatagatcggtgtttcaagatgccgcgtttccttgtggattttaatgagctgctcctcggaatagacaggctgggaaatgaaatagtctgcgccgcaggcgatttttttctcaagccgtttcaccgctttgtcaatgtgtctgacattcggattgaaggcggccgccactgagaaattcgttttcttgccgagcggtttacccgaataggacaagccttcgttaaactgcttgatcaggctgatcaaatcgaacgatgtcaggtcatagacggaagtcgctcccggaaagtcgccgattttcgacggatcgccggtaatcgccagcacgtctgacagccccagcgtatcgagtcccattaaatgggactgcaggccgatcaggttgcggtctctgcatgtgatatgaatcagcgacctcatatcgaggcgctgttttaagagcgccccgcaggcgacattgctgatcctcggtgtggcaagggagttgtccgccaatgtcagtgcatcgattccggctgattttagctcctctgcggcgtgcaaaaatttctcaaagtttaattgttttggaggatcgagctcgacgataatggaccgtttctgctttgccagatcgtcaagagcaggctctgtcctttcgttttgaacggcaagcgccgctttctttctgattttcactcgtttttcggtgactggaggaagtcctttgacggcctcagccatcgctctgatgtggttcggcgtcgttccgcagcagccgccgatgatccgtgcgccttgattgcggaattcctccgcgctttccctgaaatattcatcatccgtctcataaacaagcctgccttcgacaagggacgggaggctgctgttcggatagacggaaagataggcatcttctaaaagcgggacttcttcaagcgctctgatcatatgataagggccgagacggcagttgatgccgacgacatctgcgccgagtgatgccagctgcttcagaccgtccgcaagcggggtgccgtcctgaagaacgccctcttcgtgcatcgagacattcaaaatgatcggcagctccgtttcctttctggcaatctttaaaacttcgcgcgcttcttctaagtcgtaataggtttcgagcagaagtccgtccggctgctcatttaacagaaggtagagctgttcgcggaagcttcttttaatgtcctcgagagaatacgagtttttgttgaacgtccggattccgccgagcgtaccgagaacataagcggagccggcggcggcgcgggcgaggcggacggctttttcgttgatttgttttgtttcgtcttcgagtccgtatctggacagcttgatgaagtttgcgccgtacgtgttcgtttgaataatgtcggcgccggcctgtacatacgcttcgtggacgcgtcttatttcttcgggcttggagatgttcagttcctcaaaacacctgtcgatcccataggaatacagaagcgtgcccattgcgccgtcagcgattaacgttttgttttttatatcctccaaaaaacccatcgttttcccccttaatcattcttaataaaacaaaaaagtcttctgggaagcagaagacttttcagcgacatttgtccgtcttcttatcttccaagcaggctgcttgctggatttagcaccttggtcatgaatattcattcaccggttgctgaggcttcatcgggccagtccctctgcctctcttgataagaacagctatttagtttctattgattacttttactcaatttaccgaaaatcgggggaataatcaacagtaaattaagaatttatcgaaaatttataaattgaacatcaatcggcaggtcggcttccctcaccatcgcgatgatttgctgaaggtcgtctttattttttccggttacgcggacttgatcgtcctgcacttgcgatttaactttcagacccgatttttttataaggttattgattttttttgcgttttctttgtcgatgccttgaactaattttccgcgctgtctgaccgtgccgcctgaagcgttctcaagctttgagtattcgatgtttttcgtcgggacgttccgcttgatcagtttgccgacaagtacgtctttcaactggttcattttaaattcgtcgtctgatacgagaacgagttcgtctccttcgagtgtgatgctgctttttgaccctttgaaatcatagcgtgtgccgatttccttgagagcggtctggattgcgttttgaacttcaggcagttcaacctttgagacgatatcaaatgagctttctttcaccatgtgaaaaaacctccatccattttacttatgagtcaattatagtagaataaggtgaaacttccaatatcgagcggttttgcctggccgcgatctggcaataatttgaacattggaggaataataagaaaaagaaaaacaggcggataagaaaggaagaagcagtatgaaacctggacagcagctaacattgaaaatagatcataaagcagattacggttactttttgacggacggcgaaacggcggtccttctgcatcagagcgagatcaccgaggatattgacgggagagaagaggtcgatgtttttttatatgtcgatcacgaagatcgccttgcggctacgatgagaaagccgatcatcagcgctgaacaatacggctgggtggaagtcgttgatgccgtcagcggcatgggcgttttcgtcgatgtcgggctctcgaaggacgccctcgttgcgacagagcatctcccgccgtatgaatcagtatggccgcaaaaaggagacaggctgtactgtatgctgaaaatcacggggcacggaaggatgtttgccaagccggcgccggaggacaagatcagcgaactgtttactgaagcttcacccggcctgatgaataaagagctcaccgggacgatctaccgcttgatcgcatcaggctcttttatgatttccgaagccggcatcagaggcttcatccattcttctgagcgaaaggaagagccgaggctcggcgaaaagctgactgcaagggtgatcaaagtaaaagaagacggttctgtaaatctgtcgcttctgccgagaaagcaggatgccttgtcggttgatgcggaacaaattctgacttatatgagatcgagaaacggcgcgatgccattctgggataaaagcgatccagaggatatcagagagcgcttcaacatgagcaaagcagcatttaaaagggcgctcggccatctgatgaaacaggataaaatctatcaggaagagggttggacgtacgagaaaaaataatcttgaggcggcgttccgatcgggacgccgccggtttcttacaggtgatgaggcttctttgattcctggtgtttaccggcttgtctgttcttttcggcgagccggtttttctgctggttgacggcgttattgtcaaccggctttttatcatcatctttcatgaggaagcacctcccgtcaaaatgtcgctcttagcttgctcactgccggcgaaactatgtactctcccaattgcgatgttttttgccgggaagtttatgccaccttgttccgtcagcatacacatatcataagacccaaaaaaggagacttggtatgaaacattgctgctcagtttacattcatcgcgtttcggcaggaggggtcgtcaacttcggcggtgcgtacaaaatttgtccgatcacaatggaaaaagtggtcgagggatctggaggcccggatgtcgcgacagctgctgccggctttcttgatggagcgcttgcgccggccgttgaggaagggacagtcaccgaagacagctgacgctgaggcctgcttttaaaaagcaggcctcagcgtgtcgacaaaccctcgcattcgttgtcaggcctgctaagtcggtgctcacgaataggagaaggatcggcggctaatcgcccaggcgtcctgcctgaacgccgccgtcgtcacttcctgtgaaagtccgctccgatgctcggccttcctagactgaaagggttttgggtcacgctgaaagaaggatgacaaaatcccaaaactaagagccgttttgggattttgtcaacaatctaaggcctgcttttataaagcaggcctctgttttatcttatcttttgtctttccccggaaaaaagaccgccaatgttccgggtccggcgtgggcgccgaccgctgaaccgatcatgttgacgacgatctcctccggctggaattcggcttcgatcatccgtttgacttcttcggccgtctcttcgtcatctccgtggctgatgccgaccgtctgtccgctcaaatcgacgcttctttccttcattaattcgatcatccgtctgagcagcttctttttgccccggattttttcaagggggacaagcttgccgtcatcaacatgcaaaagcggtttaatattcaacagcccgccgacaaatgccgatgctttgctgattcttccgcctcttgccaaataagtcaagtcatcaacggtaaaaatatgttcaagatgttcgcaaaagtcctttacagacgactcgatttcttgtattgtattgccgttagttgcgagtttgagggcgtgcttgacagcaagcccatagcctaatgaagcgcattttgagtcgatgatccgcaggtcgaaatcagggaactcctccttgacttcgtttgccgccatcacagccgtctggtatgttccggacagctctgaggaaaaggcgatatagagagcgggtttattttcgttggccagctcgctgaatgcgttcttgaacagcatcagagacggctgggacgttttcggcgctttgccttcgcgcatcgcttcataaacgtccagaggctgaatcgtcagaagatcatcgtattctttttcatcaagcagcacccttaacggaataaatgagatgcgatgttcatcataaaaagatttcggcaaatctgccgcgctgtctgctaaaaggtgaacgttcatttgaaccccttctttctaaaaaatggttgaaaaggacactaagctgtccttcggcatacttcgttttttaggtcaactatatcatatatttttacattgacgttttcaaaatattgttttaagggtaaaccaaatatatacgaaagtagcggaggaactaaatatggtcatagcggaagcaaaaaaattgttcattgtcatcatcggcgccttgttaaatgccatcggattgaatctgtttctgattcccgccgatgtttacgccagcggctttacgggggtggcgcagcttttatcgagcgcgcttgaccagtacagcccgatttatttttcaacggggacgctattgtttattttaaacattcccgtcgggattctagggtggctcaaggtcgggcgctcatttacggtctacagcattttgagcgtggccttgacgacggtctttttggggatgctccctgaggcgagcctgtcaaacgacattttgctgaatgccgtgttcggcggggtgatcgccgcggtcgggatcggcctgacccttaaatacggggcttcaacgggcggtttggatattattgcgatgatcctggcaaagtggaaagacaaaccggtcggcacctatttctttattttaaacggtgcgattattttaacagcaggattattgaacggatgggagaaagcattatatacgctcgttacactatatgtgacaaccagggtgattgatgccatccacacccgccacgccaagctcaccgttatgattgtcacaaagaaagcggaggagatcaaagaagccatttacgggaggatggtccgcggaattacaaccgttccggcgaaaggcgcctttacgaatgaacagaaagaaatgatgatcattgtcatcacaaggtatgaattgtacgacttggaaaaaatcattaatgaagttgatccaaaagctttcacaaacgtcgtacagacaacacaggttttagggtttttccgcaaagattaatgaaagggtgaatgaatgcggctgatttccatgattgtgatgctgctgtttgtcagtggatgcgggcaaaacggggatcaagtccccgataaggaggtatcaggggaagtggataacgggagtgtgacattgacggttgaacccgtccagaagcagggagaaatcgaatttcggatgtcggttgtaaaccatacggatgatgcggcagagtttgaattcagcagcggacagaaatttgagctgatcgtcagcgacaaagaagggaatgaaagataccgctactcgaaaggaaaaatgtttacacaggctttccagacgatgacgctcaatccgaaagagtcctacgattttactgatgtatggaaagaggtgcctgaacccggcacatacgaagtaaacgtgacatttttggggagatcggaacagtttgcaactttgagggccggcaaaacgtttgaagtgaaataaccatcaaaaaaaggcatcccgggaaaggatgcctcttttgtattctgtcaggaaggatcggcggctgaatgaacaccgccacggtcacaggatgtgaccgttaatattgatccccattgaaaatagaatttttaacgatgacatagtctacgttgcggatcgcatcgagcttgtttcctcccgcataagaaatggacgactgcagatcctgttccatttctgtcagcgtatccatgatcgcgcctttatgctccacgtacatttttttgccttcgacatttttcttttcgcctttttggtactcagaagctgaaccaaaatattctttgtagagcttgccgtctttttcgatcgttgctccaggcgattcttcgtgtccggcaaacagcgaaccgatcatgaccattgtcgccccgaatctgaccgatttggcgatgtctccgtgggtgcggatgccgccgtcagcaatgatcggcttgcttgccgcttttgcgcaccagcgcagcgcagccagctgccatccgcccgttccaaaaccggttttgatttttgtaatgcagacttttccgggaccgatgccgacttttgtagcgtcggctccggcgttttcaagctctctaacagcttcaggcgttccgacatttcctgcgatcacaaagctgtccggaagatgttttttaatgtgctgaatcatattgatgacggcgtttgagtgaccgtgggcgatatcgatcgtgatgtactcgggtgtgagattctctctcgtcagctcttcgataaacgcgtattcttcatctttgactccgacgctgattgaagaaaacaaaccgcgtgccttcatgtctttaataaaatcgatccgtgtttccggctcaaagcggtgcatcacataaaagtaaccgttttccgctaatgaaacagccagcttttcatctataatggtctgcatattggccggcacgacaggcagtttaaatgtccttccgccaaactgcacggatgtatcacattcagaacggctcttgacgatgcactttgcaggaattagttgaatatcttcgtaatcaaatacattttccaatataaaaacccccaaaaaaacgaatatttattaataagttatttaaaatgttcgccttttataatgtacttccttttgttcccgatgtcaaatttttatgctttgagagcggaaaaataaaaaaggagccgtgccgatggcacagactcctctccggctgtcaaaagccggtgcggtattatgatagttgatctagctgctcctgaagattgtgaagctgtcgccgttcggcatcagttgaattggcatacgccgaggaaagggcgtttttagctcttgcaacggctttcgccttttcgcctgaatccgccgaagcttcagctgcatgtacggctgctttggccatttgaaacagttcgtttctcatttacagccctccgcattccgtcgggccgctcttctgttcagcctcttctaatgtggagcggtaagggaacctggcggcatgctgtttaagcgagtctttgccttgctgaataaaccgttttgatttgctgcgtttacccatcttgaattcccccttaacacaagtgacggtccggtgcggccgtcttctcatagtatggccgttttgaaaagccgtttatgaatggcaaattataaaattataaagcgaagtaatcctttaaaaagactgcgattccgtcttcctcattcgatttcgtgaccttgtttgcaacgctttttaccccttcgatgccgttgcccatcgctactccgcagcctgcgaactcaagcatttcaaggtcgttgtcttcatcgccgaaggcaatgacccgctcaggcgggattccgtagtagtccgtgattttctctaagccgaccgctttattgatgccgcttttaatcagttcgattacatgccacggggccgcccatcttctatggtcgaccatctctgcgtgtacgtctgacagataggagcggatcgccggaacatcctcttcttttgcgtgaatcaatacgcttgtcacatcctggccgaggtttgttcttaaatctccgactgtaatattcgggctgcccatcgtaaagacatcaatcagcttttcgtcatgataatgaaaataaacatcatcgacaatttcagcaaggatattatgtacgttgtacgtttcgctgacttcaatgatctgtttgaccacctcgagatcaagagatgtatggaagcgtccccagctttcatctttagggtgatggacaaacgcgccgttgaaattgacgatcggcgtatcgagctggagctgatcataatacatggagcttgctctgaacggtcttcccgtagaaatgcacacgtaatgtccatcttcccgcagcttgcggatgacttcgctggagctttccgagatggtcttgtcgtcttttaataatgtaccgtctaagtccaatgcaattaaatatggttttgtctccataaatgctcctttaatgtgaatttgaaagttctgacttacctatagtgtatctttttaccttctttattgtctacatgttaaacttatgatgatggacatcctaaaaggaggaagaaacagtcgtgatcataatcgaaaagcagcatatttcaaacattcctcttttgcatattgtaaaagaggagaaaaaagagaaagctcttcctcttgttttcttcatacatggttttacaagcgcaaaagagcataaccttcacttcgcatacctgcttgccgaaaaaggaatgcgcgtgattctgcccgaggctctctatcacggggaaaggaatgaacagctcacccaggaagagctcgccccgagattttgggagatcgtcacgaatgaaatcaaagagctggaagtgctgaaaaaccactttgaacgggaaaacatgattgaaaagggccgcatcggcgccgccggaacatcgatgggcggcattgtcacgctcggcgctttgactcaatacgaatggattacaactgccgtcagtttaatgggcagtcccgcctatgtagaattttttgatcagcagctcgcatttatgcgtgaaaagaaaattgaacttcctatcacagaagaacaaatcgatcagcagcgcgaagaactgaagcgttttgacttgagtctgcagccggacaaattgaacatgaggccgcttttattttggcacggcaaacaggacggcaccgttccatttgctttaacgcgccgcttctatgaatcgattattccactgtatgaagctcggcctgatttgctgcattttatcgaagatgagcgggccggacataaagtatcgagggaaggccttttgaaaacagtcgaatggtttgacgcgcacttgtaagcactatcgttttagaaaatgaacgaagtgcgttatactgatgaaaaaaggagtgaggaagagtggatgaagcattaaaagaaaacatcatgggcgcccttgaacaggtcgttgaccctgaattgggcgtcgatatcgtcaatctcggccttgtatacgacgtagatatggatgagaacggcaaaacagacgtgaccatgactttgacttcaatgggctgtccgctggcgccgatcatcgtagatgaagtcaaaaaagcgctcgcagatattccggaagtcaaggaagttgacgttcatatcgtctggaatccgccttggacaagggacaaaatgtcgcgatatgcgaaaatcgcacttggtatacaataaacgtttccagagcctgttcaaccgttgacaggctctttctcttccatataaagggaatgatcccggcagatggcctctcccgttattaatgaaaaagaacgcttttacaagcgttctttttttattgcaataactgctgccggcacattctccggtttgaaaagcggggaacccgggaaggtaagaacggagcacgaccgagccgaagaaaaggaccgccggcgggaggaaagaaccaatatgaaaggtgattgaaaaaatattaaatatacaattgaattaattttttattcatgttataatgttaaataatttcacaaagaccaagaaggtgaactcgttttgaaaataggtattataggtgctactggctatggaggggcagaaatcatgaggattatgaggactcacccttatgcagatgaatgcatattgtattcatcgagtgatgagggagcccgctatgacgccgcatacccgcaccttgtgaaactgatagatcaacacctgcaaccgatcgaggttaagaggattgcgaatgaaatcgattttttatttatggcagcgcctccggggatatccagccggctgacgccacagtttgatgcatatgacatacccatcattgatctgtccggcgatctcaggatacagaacccaagcgtctatgaaaagtggtataaaagggaagccgcgcctgaacacgtgcttcaaaaagcggtatacggactgtctgagctgaatcgggaagacattaaaacggcgcagtatatagccaatccaggatgttttccgacagcggttcttctcggcttggcgccgctcgtcaaaagcggcagcatcaacgaatcttttgtcatcatcgatgcaaaaacaggggtatcgggggcaggcagaaagccgtcgatgggcactcatttttcagaggtcaatgacaattttaaaatatacaaggtaaacgaacaccagcacacgcctgaaatcgagcagactgtcaaacagtggaactccgcatttaaaccgatcacattcagcacgcatttagttccaatgacaagaggcattatggcgaccatctacacagagctgaaagacagcatggatgccgaacagctgcagcttattttttctaaattttataaagattcatactttgtcagagtgagagaaacgggttcgttccctgccacaaaagaggtgtacggcagcaatttttgcgatatcggcgttaccgtcgatgaacggacgaacagagtgacaatcgtgtcagtgatcgataacttgatgaagggagccgcgggtcaagcggttcaaaacttcaacattatgaacggcttgagcgaaaccgccgggcttgaatttacgccaatttatccataagacgggagagaacaaacttatgattcaggtgagtcaagacagcataaaaaaaacagacggaagcgtcgcttcgcctaagggctatcttgcaaaaggggtccactgcggcctccgctattcaaaaaaggatcttgggatcatcatcagctcaagaccggcggtgagcgccgccgtttatacccaaagccactttcaggctgcgccgatcaaggtgacgcaggaaagcctcaaaaaaagcgcgcatctccaagccgtcatcgtcaacagcgccaatgccaacgcatgcacgggagagcagggcttaaaagatgcttatgaaatgcgccgtcaaagcgctgatatgctcgggatcgagccggatctggtggccgtgtcctcaaccggcgtcatcggcgaatacctcaatatggaaaacatcacaaaaggcatcagccttctcgccgagacagagcctgccgaaggcgatttcgaagaagcgatcttaacgacggacaccgtgatcaaacaaacgtgctatgaactgatgatcggcggccaaaaagtgacgatcggcggagcggccaaggggtcgggaatgatccacccgaatatggcgacgatgctcggctttgtcacaacagatgcatgcatcgaagaaagcgcgctgcaaagggctttaagggaaatcacggacgtttcgttcaaccagataacggtcgacggcgatacatcgacgaacgatatggtgctcgtcatggcgaacggatgcgccggaaatgagcgcctccatgaagaacacgaagattggccggttttcaaaaaaggcctgcagcttgtctgcacagacctcgccaaacaaatcgcaagagacggggaaggggcgacaaagctgatcgaggttgaagtgaacggcgcgaaaagcaatcttgaagcgcaaatcatcgccaaaaaaatcgtcggctcaaaccttgtaaaaaccgcggtttacggaacggatgcgaactggggcagaatcgttgtcgcaatcggggacagcatggctgctgtgacaccggagaaggtggaaatccgcctgggcggccaatgcctatttaaaaacaacgaaccccagccgttttcggaagagctggccaaaacatatttagaaaacagcgaagtgaaaatcgaggttttcatgcaggaaggtgaaggaaagggtacggcttggggctgcgatttaacttatgaatacgtcaaaatcaatgcgagctatcgtacgtaaaaaaggggatcacaatgggtaaaacaatcgtttttaaatgcggcggaagcgtcatccgcgaactctcggacgaattttttcaaaacctgaaagatctgactgaaagcggctggaaaatcgcgctcgtgcacgggggcggacccgatattacaaagatgctgaagaagctcaatattcgaaccgaattcgtcaacggacagcgcaagacgacaaaagcggttcttgaagtcgctgaaatggtcctgtccggttcgatcaacaaatttttcgttgctgagctgacaaagcacgggcttccggctgtcggcgtatcgggaaaagacgggggactgctccttgcagactatttaaatgaaaaggaatacggtcaagtcgggcgcattaaaaaagtaaacggccaaatggccgaagcgctcatggaaaaaggatttattccggttatcgcacccctctcgatgacggatggctgtgagaccttgaatgtgaacgccgatttggcggcgtcggctgttgcggcagccttgcgcgctgacaaattgatgtttgtgacagatgtcaaaggaattatgaaaaacgaagaattgctgaaagagctgacgcccgaagacatcgaaagcctgattgctgaaggcgtgatctcgggaggcatgataccaaaagtgcattccgcaaaagaggctcttacagatgaagtggaagaagtaatgatcgtaagcgggaaaggatctttcctgacgaaagacgatttcatcggcacgaaaatcatcaaacaaaaggaggccgtatcgtgagtcacttatttcagacgtacagccgctggaatatcaatattaaaaaagcgaaaggcacgatcgtccaggatgagaaggggaacgcctatctcgatttcgtccagggaatcgcggtctgcaatctcgggcattgccccgattcagtaacggctgctctcaaaaaacagcttgacgatgtctggcatgtttccaatttgtttcaaaatgagcttcaagaaaaggttgcacagctccttgccaaaaacagtgcaggcgatctcgtcttcttttgcaacagcggggcggaagcgaatgaaggggcggtgaagcttgcgcgaaaacatacgaaaaaaacaaaaatcgtaacctttcagcaatcgttccacgggcgcacgtatgcgggaatggctgcaaccggacaggaaaagatcaagcacggattcggaccgatgcttgaaggattccattacctcccttacaacgagccgaaagcatttgccgaattgcaggacgaaaaagatatcgcggcggtcatgctggagccgattcaaggcgaaggcggcgtcatcccggcgagcagagaatttctgcagagcgttcaagacttttgccgagataagcaggctctccttatcattgatgaagttcaaaccggaatcggccgcaccggtaaagcattcggatatgaacacgaagggctgtcacccgatatcgtcaccgttgcgaaagggctgggcagcggttttccggtcggagcggtcatcggcaaaaaagagctctcagaagcgttttcgccgggctcccacggcacgacattcggagggaacatgcttgcgatggctgcggcaaatgccacgttggagaccatttttgacagaagctttcttgaagaagtgagcgccaaaggagcatttttgcatcaacagctgaaagataagctccaatttccgcttgtgaaagatatccgcgggaaagggctgatcgccggaatcgagtgcaaagaacccgtgcagccgctgatcgaagcgcttcaaaaagaaggcctgctcgttcttcctgcgggtccgaacgtcatcaggcttctgccgccgttgacggttgcgaaaagcgaaatcaaagcggccgtggagaagctgaaagatgtcatggcaaatcattcggctgtaaagcagtaatttttttgaaatgaaagtataaaaattcatgaatatcactatttattcatcaaaggtgggcataagatggaaggatatttagttcttgaagatggtacatccttcagcggagaactggacggtcttgacggctgcaccggtgaagtcgtcttttttacgggcatgaccggttatcaggaggttttgacagatccttcatataaaggccagattattgtctttacgtatccgctgattggcaactacggaattaatggaagcgatgctgaaagcaaacagcctcaggtgagaggggtcgtcgtctatgaagcgtgcgacagattttcccaccatcaggcgacagaaagccttcgggaatacttggcgaagtgggatgttccgcttttgtcccacgtggacacaagagcggttgttcagcatatcagggcaaaagggacgctgaatgcgaggctgacgaaacaaaaggacgacatcccggctccgcgccagctggaaaactatgcggcacaggtttccggacaaaacgaaaacggcgctttaggggaaggcaatacgcatattgcgctgatcgatttcggctataaaaagtcgatcgcttcatcgctagcaaaccggggctgcaaagtgacggtcgttccctatcaagagatggacggcattgcgaagctgaatccggacggaatcgtcctttcaaacgggccgggcgatccgaaagcgatccttccatatatggatgcactccggggtatcatttcttcctatccgacgctcggcatctgcctcgggcaccagctgatcgcgctcgcattcggaagcgacacgtataagcttccgttcggccacaggggagccaatcatccggtcatggacaaagagaccggacgcgtgttcatgacaagccaaaatcacagctatgtcgtcgatcgagacaccatcagcgaaaatgaattttccgtcaggtttcatcatgtcaacgacggttcagtagaagggctgatgcataaaacactgcctgtcctatccgttcagtttcatccggaagcccatccgggaccggctgaaagcgaatggatattcggagaatatttgcagaaattgaacgaagcaaggagagagatcgcccatgcctaaagaccaaaccatcaaaagcattctcgttatcggatcggggccgattatcatcgggcaggccgctgaattcgactactcaggaacacagggctgcatggcgctgaaaagcgaaggctaccgggtgattctcgtcaacagcaacccggcgacaatcatgaccgatgaatcttttgcagatgaaatctattttgagccgttgacagtggaaagcctcatacaaatcatcaagcgcgaaaaaccggatggactgctcgccaatctgggcggacagacagcgctgaatttggctgtcgagcttgaaaaggccggcattctgaaagcgtacggggtgaagctgcttggaacatctgtcgatacgatcgaaaagggtgaagacagagaaaagttccgcgccttgatgaaagagctgaatgaacctgtgccggattcagaaatcgttgacaatcaggatgatgcgcttcgttttgcgctctcaatcggttttccgattatcgtgcggccggcctatacactgggcggaaaaggaggcggcatcgcggcgacaaaagaggagtttctgcctttaatcgaaagcgccctcctcgcaagtccgatccatcaatgccttgtcgaaaaaagcattgccggttttaaagaaatcgaatacgaagtcatgcgggacagtaacaatacatgcatcaccgtctgcaatatggaaaacatcgatcctgtcggcgtccatacgggagattcgatcgttgtcgccccgtcgcagacattaacggatgcggattatcaaatgctgcgttctgccagcttaaaaatcatttccgcgctcgatgtcgtcggcggctgcaacattcaattcgccttggacccggagagcaaaaactattatgtcatcgaggtcaatccgagagtaagccgttcatcagccctcgcctcaaaagcaaccggctatccgatcgcaaaaatggcggcaaaactggctgtcggctacacgcttgccgagctgaaaaatccgctcacagattcgacgtatgcaagcttcgagcctgcgcttgactatgtcgtcgtcaaatttccgcgctggccgttcgacaaattcaaacaagccgaccgcaagctcggcacgaaaatgaaagcgacaggggaagtcatggcgattgaccgcaatcttgaagcggccctgcaaaaagcggtcgcctcccttgagctgaaaacatcaggaacacatttgcccgaacttggcggcgtatcttctgaagtgctgtggaagctgcttgagacccctgatgaccgccgtttctttgcggttatggaactgctgagcagggggacttccatcagcgaaatacacgagaaaacgaaaatcgatgattatttccttcatgtgttttctaacatcattcagctggaaaacacgctgatggagcagggagactcgttgtccgtcagccttttgaaaaaggtgaaagaaaagggatttaccgactttacgatcgcttccctcaccggaaagacggaagaagaagtgcgcgcgctccgcaagaaaatgggcattgccgcatcctttaaaatcgtcgatacatgcgcggctgaatttgatgcgaagacaaactatttttactcaacgtacttcgggaaaagcgacggagacatctctcaaaaaacgaaaaagcgggccttgatcatcggttccggcccgattcggatcggccagggggtcgagtttgactacagcgccgtgcacggcgtcatgacgctgaaaagcctcggatttgaaacgatcatgctgaacaacaatccggaaaccgtcagcacggattatgaaatggcggaccgcctgtactttgaaccgattacacccgagcatattctcaatgtcgctgaagcggaagacatcgactttgcgattgtgcaattcggcggccaatccgccatcaatgtagcgcaagcgattgaaaaagcgggcatcaccctgcttgggacatcatcggaaacccttgacatacttgaagaccgcgatcaattttatcagctgcttgacgagctcggcatctcccatgccaaaggagaaacggcttcatcaaaagcggaagcggtgaaaaaagcgaacgaaatcggctatcctgtgctgatcaggccgtcatacgtgatcggcggaatgggcatgatgatcgttcactcagaagcggagctcagagagctgctgggcggggcatcgcaaatgccttacccgattctgatcgatcaatacgtatcaggaaaagagtttgaaatcgaccttgtcagcgatggcggcgatctttatatcccgacttatatcgagcatattgaaaaagcaggcgtccattcaggtgacagctacgcgattttgccggggccttcggttactccggagatgaaaagcgccgctcgggatgctgccgcaaaaatcgtccgcaagctcggatttaaaggcattatgaacattcaatttatagcggattcggatgagctgctcatccttgaagtcaatccgagggcgagccggacggttccggttgtcagcaaggtgatgggagttccgatgatcccgcttgcggcgaaactgttagccggttcgtcactcaaagaactgaagcccgccgccaaaaattcacgcggtgttgccgtgaagtttccggtcttttcatcgcacgccattcaagatgtcgatttgaagcttgggccggaaatgaaatcgaccggtgaaggcatgtatgtcggcttcaatccggaaagcgccctgaagaaaatctttgcaggaatctggcaaacgaaaggctgcatttacatggaaggagccggcgagctccgttctctcgcagaacaggcgggcttcaccgtacagtcggacgattttccgggctggatcaaacggaaggacaaagcgctgcacatccatttagccgagtcaaaagaggcgagaaagcagaggatagaagccgtcactcacggcgtggcggtgatgacggaagaagagacggtgcgggcatttttgacgagcgggcatggaacgactaaagccgtgtcgcttaaagatttatataaaaaggaagtggagacatgtctactgtaaacatcggggcgacccgggagatcaatctgtcaggcaaggatttcttaagcctgaaagacttttcaaaagaggagatcgtctatttgctgaaagaggcagcggcaatgaagcgaaataaaattcaagacatctttaaaggaaaaacattggcgatgatctttgaaaaatcgtcgacgagaacgcgcgtatcgtttgaagccggaatggcgcagctcggcggaaacgccctgtttttaagcagtaaagacatgcagctgggcagaggggaaacgatcgcagataccgcgaaagtgctttcgcgatatgtggacgcgattatgatccgcacattcgaacacgaaaaagtcgaagagcttgccaagcacgccgagattcccgtgatcaacggattgaccgatctttttcatccgtgtcaagcgcttagtgacctattaacgattcaagagatgaaaggaacattaaaagggctgaaagccgtttatgttggcgacggaaacaatgtcgcgcattcgctgttaatcggctgcgcgaaagtgggatgcgacattacggtggcttcacccaaagggtatgagccgaatcaggacgtggtgaaactggccgagacattcgccgaagaatccggtgcggccgtcacgatcacaaatgatcccgtgtcagccgttcaacaagcggatgtcatctattctgatgtttttacaagcatgggacaggaggaggaagccgaagaacggatgaagatttttgctccttaccaagtcaacggaacgcttgtctcccatgccaagcctgattacatctttctgcactgccttcctgcccaccgggaggaagaggtcaccgcagagatcattgacggtccgaattcagcggtatttcagcaggctgaaaaccgcctgcacgtccaaaaagctttattaaaagcactgttatcttaaatgaaaaacagctgatccattgatcagctgtttttaggcgaatatcaaaacggcgatgccgatgacaaagcagtaaatcgagaaataaaccaagtttcctttcgccataatattcatgaaccagcgcaatgagaagtatgtagctataacagatgcgatgaacgcgaataaataaggaagaaaaagctctcctaaacgcggatcatgaaaaatatcggtaatgcttaaaatggttccgccaaggctgaccggtatgtaaagcaaaaatgaaaacctgagcgcagtttcagatttgaggccgagcgccatcgcaggaacgatcgtcgctcccgaacggctgatgccgggaacaagtgcaaccatttgcgaaaagccgatgatcacggcgtctctcagcctgatttcgccgtcgcttttccggccgcgcaaatttcgaataagaaacaatgccagacccgtaataagcaaagtaactgcggtgatccggacgccgtctttaaagaaagccgaaatctcatcatcaaataaaacgccgatgacaccggcaggaatcgtggcgatgatcagatagatgataaacctgaagtccgcttttcctttttcattttttgatgtgacataagacagcccgtttaccgccagcctgaaaatatcgtttttataaacgagcagtacggcaattaaagaaccggcattcatcaaaagctcaaaactgaagccttcaatattcaagcccaaaaagtgctgtgccagcaccaaatggccgcttgacgaaacagggatcggctctgtgaatccctgaagcaaccctaaaaggatatacttgatcaacactaaaaaatccatgatactcctccgtttcccacaagttgtgatgcccttttaacagacggaatgtacaggcggttcgtttcaattttcagaacgcttttctcattaaactacacaaagcaaacagatgtaaagataaaattgacatgttttttgagaaattggggcaatctaatggtaaaagggagtgaagcaaatgggacagcagcgtcaattccggccgggccaaaaagcgcccaataatggagtgtatgtggaaatcggcgaaacgggaagcatggttcagaaccctcagcaaatcaaattgagcgccggcgagttcttccctgaaacctccaatcataaccggctctggacatataaaagaaagaccttaaaaaaacagccgtcggtttttctgccggctgtctgtctaaagcaaaaaaccccgcttttagaagccggggttttaatgttgacttgcatcctgtttaacaggcataatttctccaagaacaataacggctgcggtgatgataaagcccataatgacactggtttgaaggtcatacccagcaccgttcatggcgccgacaatgtagcaggccatctgcgtcaaaagaaatgtccagaaaaaagcgaccacaaatcgcacgtttcccacctcgtccttctcattcaattctaaaacttatcataccatatacatagccggctggaaaagacattttagtgaacaagacagggctttcaactccgatttcagaaatatcaaaaagggcatttgataaaagttcatttttcatcatgaagactgggacttttccttattcgtttgatgcgtgtacgacataaaataatgagcagattacggcaggaaggaggcaggcaagtgatgaaaataaccgaccgtttttttcaagtggatacagaatggaatgtggttcatcttccgtataggccgaacggttttctggtgttcattttcggcgaccgaacacatttcgtcggggaagatacgagcttctggcttcagcattacggaagaagtcagcttcttacgagcctgaaaaacaaaggctacaccctggtaaacagcaatttgttcggcaggcactggggctccgaaaaagcggttgcatacgccaaacagctgattcattacgtgttcaaacaggaaatcttaaatgaaaaaattcatctattggcggaaggcacaggcgcgctcattgcagatgaactccttcgctcgatcccgaaccaaatacgttctgcagcgatggttaatccttgcctcgatcttcaggctcatcataaaagagaaaaagaaaacaagtttttctacaaacaatttattaaagaaattgccgaaagctacggaatttcggagcgggaggctgccgattatccgttcaaaggcatctccccttatcacaatctcgtgcccgttcatatatggcaaaggctgaacggttcgccgtatccgtatatgatccatgccaaaacgtttgaggagcgccagcttaaaggccgtcacagcgtggggcttaccttgcacctgtctgaacatcctcagcgcattcattcagcaatcgcgaactttttcaaaacgcatgaaaaagtcttatagagaatagaataatagtagcccgcaaaagctaaaaagggctgttttttgcttggctaaaaaagctgaaacgaaaggtggtccatcgaatgaagccggcacttgtatatggagcagatgagtttttcggcctttcattttgtgaacatcttcttgaagagggtgtaaacatagatgtcaaactggagcagacaagcgacgaaaaaaagctgatgtaccttgaagaacggctgatgtggctgggcagaaaccggcatttccgcctcattgaaaaagagcttgaagccccatacgaacaagtcttcatccaatacacaggctccgtgccggaagaggcgcttgctgccgggattgaaaacaagcctgttattctgtttgtctatcaagaccaattcgaagaggatttgcgggccggcatcgaggaaaagggcgttgaactcgtcgtgcttccggaactgttcggcccgtgggacatcaaggcagacgataaacaaaacagagacggggcgatttttgtaaacgacgcggccgcacaagctgctgcctgtgctgtccaaaaagacttttcagcattgcggtttgtacagaagacgccatacgaaaaagccgatgagatcattgaagaatggagtagacaaatgtctacatttttcgacaaaaaataagaaagatcttcctaatttacacttgaaaggatacaataaagatagatttgatttgctggttttttgaaagggagttgaacatggcatggtgtacaggcttgtcgcgatttttttcattctcctggcgctaagcggctgcggacaatcgccgctgaaagggaaaattgaaaaagtcggtttgcttgtccctgatacgataagtgatcaagtatggggaaccaaaggatataaaggattattaagaatacaatccgtctacaatgtcgatgtctattataaagaaggaatcgataatgacgcggctattaaaatggctgtagaagattttcacaaaaaaggcgtcaatctgatctatgggcacggaagcgaatacgaaaaagcctttaatgagatatgcaaagattatcccgatattcattttgttttaatgaactctaaagccgaacaccaaaatgtgacaagcatatcgcttgagggagaagcgatggggtttttcggcggaatgacggcggcccatcagtcaaaaacaaagaaaatcggcgtgctcgcaacgtataaatggcagcctgaagtggaagggtttgccgaaggggcaaaatacctcgatccggacattgaggtaatgacagaatacgtcggccagtgggacgacagcgaaaatgccgtcaaactgtatgaaaaaatgaagaaggcaggcgcggatgttgtgtatccggccggagacgggtataatgtccctgtcattgaacaaatcaaaaaggacgggctgtacgcgatcggctatgtaagcgaccagtcggaattgggtgagaatgtcgttttgacaagcactatacagcatgtagacgacgcttatgaactcaccgccgacgagtttaataaaggaacgcttaaaggcggcaagcggtcctttgacattcaagaaggcgtcatcgagatggggaaattcagccctgttgtcgatccgtcatttcaagaagagatgaaacggctgattgacgaatacaaaaaaacaaacaaactgccaaacgaacattgaggtgatcaaagtgcacgaaaaatcgatggaatttttgcaaattgccatgaaatacgttccggaagcgaaagaagagatggagaaagcgggaatcgaactttcgccggaaatgcttgagccgttcatgaacctgtttacaaaagtgatggcggaagcttacgagctcggtaaagcggacgccggttctgacgcctgacgaaatgcccgcaaacggttgaaaagccactttttaatagaagtggcttttttatatggacatcttatttttcaaagcgctgaccattgagccgatttctttaaacacaggcttcagttcatcgattgaatccatgatttctccaacctgatgcaacacatgcatgtaatcggcttcctgggaaacttcagcgtcttcgacggtttcagattccgcatccggctcttcttcatgcctggcgggtgcatttgagccaaacatcatttttgtgaaaaaatcgtcgttcgccactcttcattccctcctttttcatatatatcactactatatgaaggttttggtctgctagattagacgaatatattgccaactaaaaaaaaatagggtaggattagtaccagatactaataattactcataacattagttggaaaaaatcatgaataaaggagtctttcctatgaaagctggaattattggaatcggccggtacatccctgaaaaggtgctgaccaatttcgacttggaaaaaatggttgaaacttctgacgagtggattcgtacaagaacaggcatagaagaaagaagaatcgcagccgaagatgagaaaacgtccgatatggctgtggccgccgcaagaagagcgatggaagatgcaaacatcgagccggaagatcttgatatgattctcgtcgccaccgttactcctgatcaggcattcccgacagtgtcctgcatgattcaagaaaagctcggtgcattcaatgcctgtgcaatggatatcagcgcagcgtgcgccggttttatgtacggcttagtcactggaaaacagtttatcgaagccggcacatataagcatgtgcttgtcatcggagttgaaaagctttcaggcattacggactgggatgaccgcaataccgccgttctgttcggagacggtgcgggcgccgcggttgtcggccctgtcagcgacgataaagggattctgtcctttgaactaggtgcagacggcagaggcggaaaacacttgtacttggatgaaaaagatcatacaatcatgaatggcagagaagtgttcaagtttgccgtccgccaaatgggtgaatccagtgtaaatgttattgaaaaagcgggattatccaaagaggatgtcgactttttggtgccacaccaagccaacatccggatcatggaagcggcgcgcgaacgtttggagcttccggtcgaaaaaatgtcgaaaacggttcataaatacggaaacacatcagctgcttctattccgatttctcttgtggaagagcttgaagctggtaaaataaaagacggtgacgtcattgtgatggtcggcttcggcggaggtttgacatggggagccatcgccatgcgctggggccgctaaaagaaaggtgaggtgcaacttatgaatagtaaaagagtagtcattaccggattaggagctttatcacctcttggtaatgacgtcaaaacaagctggaacaacgcgatcaacggggtttccggagtcggcccgataacaagggtgaacgcggacgagtatcctgctaaagtagccgcagaactgaaagattttaagatagaagattatatggataaaaaagaagcgagaaaaatggaccgcttcacacaatatgccgttgtgtcggcgaaaatggccgtggaagacgcgggcctcgacattaacgagagcaacgcagaccggatcggcgtctgggtcggttccggaatcggcggccttgaaacgcttgaacagcagttcgaaacatttttaacaaaaggaccgcggcgcgtcagcccgttctttgtaccgatgatgattcctgatatggcgaccggccagatttcgatctctctcggtgcaaaaggggtcaactcttgtacggtgacagcttgcgcaacggggacaaactcaatcggcgacgctttcaaggtcattcagcgcggcgatgccgatgtcatgatctccggaggaacggaagccccgcttacaagaatgtcatttgccggcttttcggccaataaagcgctctccactaatccggatccgaaaacggcaagccgtccatttgacaaaaaccgcgacggcttcgtcatgggagaaggagctggaatcgtcgttcttgaggagcttgagcacgcattaaaccgcggagcgacaatctacgcggaagtggtcggctacggatcaacgggagacgcctatcatatcacggctcctgcgccaaatggggaaggcggcgtcagagccatgaaagaagcgatcaaagatgcgggtctgtcccctgtggacattgattatatcaatgcgcacggaacaagcacaccgtacaatgataaatttgaaacgatcgcgattaaagaagtgttcggagagcatgcctacaagcttgccgtcagctcgacaaaatcgatgacagggcacttgctcggggctgccggaggcatcgaagcgattttctccgtccttgccattaaggaaggcatcattcctccgacaatcaatatcgaaacacctgatgaagattgcgatctggactatgtaccggacaaagcccgccgccaggacgtgaatgttgtgctcagcaactcgcttggtttcggcggacacaacgcaacgctgattttcaaaaaatatgaataaccgcaaatataaacggctgccattttagatggtggccgttttttttagcatgcataccatacagatgaaaaaggagtgtgatctaaaatgagtatagcaagcacgtatgaatggcttgaacaggcttcatccgtgcaggaattgtcaaactttctcatcccgtactttaaaggcgcttcaaaagcggatgcggcggcgattgtcagccacctgcagacccacggcatgttccgttcgtggacggacggcgaacgtacgatgaagcagcttaagaaaaacggcgtatttcagcatgtcagacgggaagaacagctgctctgcaaaagatggaacgggccggatgttccgattttcatcctgccggtcgatgaaagaaaccgcaaaatccgcgtcgaattcggctctaaatcaggccttgcgttcagcgacaaattatttttgtttttatcggccgatcttccccggtcatcgatttctgcgatcatgacgcacgaatataatcacgtttgccggttagaaaatatgacgaaagaagaaaataagatgacgctgcttgatacaattattctcgaaggcatcgcagaatatgccgtttttgaacggttgggggaagctgaaacagccgcatggacgtcatattacaccgaaaaacagcttcgccattttcaagaccggttcgtaaagccgcatttcgagctgcgccgacacgatggccggctattctcaaaaacatttatcggctcgaaatttgaaggttgccgatgttttagcctttccgtcagaagactttataaagctatcgctttaaaatactaaaattatgggattaaattaatattattacaaaaaatacaaaaaactccttgcttttgtaatgattatgtaataatatacaactataaaattttaagataattcagtcatattaagaaaattctaaaaaagtaatatattagttttttgtgatatttaacttctggtctatggaaggggaatctggatgagcgcattgctggaagtcaatgatttaaaaacttattttttcagaaaaaagcagccgatacccgcagtggacggcgtcgatttttcaattaaaaaaggggagaccgtggcgctggtcggcgaatcgggatccggtaaaagcatcacgtctctgtcaatcatgggactcgtcgagggctcgggcggaaagatcatgaacggttctatcaagctcgaaggacgggatctcgttacatacaaggaacaagatttatgcaagatccgcggaaatgaaatctcgatgatttttcaggagccgatgacctcgctcaatccggttttgacgatcggcgaacaaatcacagaggtgctgatctatcataaaaagctatcgaaaaaagaagccgccaaaaaagcgatagaattattaaagcttgtcggtttttcaagggcaggcgagctgatgaaagaatatccgcaccggctgtcgggcggcatgaggcagagggtcatgatcgccattgccttaagctgcaatccgaagctgctcatcgcggatgaaccgacgacagcgcttgacgtcaccattcaagcccaagtgctggaactgatgaaagacctatgcgacaaattcgatacctccatacttctcattacccacgatctcggcgttgtgtccgaaattgcggaccgcgtgatcgtcatgtattgcggacaagttgttgaaaatgccacagtagacgagctattcgacgaacccctgcatccctatacaaaaggactgttaaactccatccctgtcattgaaggctccattgaaaaattaacagccattaaaggaaatgtgccgacgcctgacaaccttcctgccggctgccggttcgctccaaggtgtccgagcgcggtcgacaaatgctggggggcgcagccagacttgaaaacgcgtccggacggccggtctgtcagatgttttttatatgaggagggagaataagggatgacttcatcagctgaacaattacagcccggacaggaaatgaacccacaacaatcccttctggagctgaaagacatcaaaaagtactttccgatccgctcagggatatttcagaaaaaaatcggcgacgtcaaagcggtggacggcatcagtttttcgcttaaacgcggcgaaacactcggcattgtcggtgaatcgggctgcggaaagtcgaccgccggacggacgatgatccgcctttataaaccgacggcaggacagatcttttacaaaggccgcgacatttcaagtttgtcggaagaagcgttgagaaagagcgtccgcaaaaacatccagatggttttccaagatccgtttgcctcactgaatccgagaaaaacgctgcgttccatcatcaaagaacccttcaacacgcatcatatgtacaatttcaaagagcgcaacgaaaaagccgaagagcttttggctaaggtcgggctgcacccgtcgtttgcgaaccgctatccccacgaattttccggggggcagcgccagcggatcggaatcgcgcgggcgctcgccttaaatccggagcttattatcgccgatgaaccggtatccgcattggacgtgtcaattcaggctcaagtaatcaacctgatggaagagcttcaggaagaattcaatctgacatatttgttcatttcccatgatttgagcgtcgtccgccatatcagcgacagggtcggtgtgatgtatctcggcaaaatgatggagctgacagacaagcatgagctgtatgacaacccgcttcatccatacacgcaggcgcttctgtccgccgttcccgtcactaggaagaaaggcgggacaaagcgggagcgaatcgttttaaaaggcgagctgccgagccccgccaaccctccgaaaggctgtgtatttcatacgaggtgtccggccgcaaaagcgatttgcgcggaagccgaacccgctttcaaggaagtgaaaacaaaccattttgtggcgtgccacctttacgaataaagggggaggccgtcacatattaaatccttgagagggggaatgtcttctttaaaaaacgggggtcaatcgggtggaaagaaggacaacagtttaataagggggaattcataaaatgagcaaacgcaaaacaggattttcaattttaagcttgctgctgatcttatcgatctttctaacggcgtgcaacagcggcgaagtcggaggggacgaaaaggaaggcaaatctgacgggaagccgcaaaagggcggtgacttggtcatcggttctacaggggagcctacgatgttcaacgctttatattcaaccgatgtgtcaagctctgatattgaagggtttatttttgacggacttgtcggctctgacaccgatttgaatccgacgatgaagcttgctgaaaaaatagatcagtcggaagacggcataacgtataacgtgactttgaaaaaaggcgtaaaatggcatgacggcgaggagtttacggccgatgacgtcgtgtttacgtataacatcccattaagcaaagactatgccggtgagcgcggctccaattttggaatgattgataaagtgacgaaaaaaggagactacgaggttgaattcaagctcaagcatccggacccttcatttttgcctgtctctttaagctacggaatcctccctgagcatattttaggggacgtgccgattaaagaccttggcgaacacgaatttaacaggaaaaaaccgatcggaacgggaccgtttaaattcgtagagtggaaacaggggcaatacgttaaagtggaagcatttgaggattactacggtgaagggccataccttgacacgctgacatacaaagtgattccggatgccaatgcagcgatcgcccagcttcaggcgggagacattaattatttcgtcgtcccgggcacggatgtgaagacggtcgaaaaattcgatcatgtcaagcttgagtctgatctaggcctgaactattcatacctcggctggaacgaaaaaaatgagctgtttaaagataaaaaagtccgccaggccttaacccatgcgattgaccgcgaatcgatcgttcaaaatgtgctggacggcgatggggaagtcgcgaatattccggaaagccctgtatcatggaactatccgaaagacgccgatattccggtctttgaatacgacccggaaaaagcgaagaaaatgctcaaagaagctggttgggaagatacagacggtgacggcattttagacaaggacggcaaaaagttctcctttaccattaaaacgaaccagggaaataaagtacgcgaagatgccgcggttgtcatccagcagcagctgaaagaagtcggaatcgaagcgaagccgcaaatcgtcgagttcagcgctttaattgaacaaacgagcgcgccaaactggaattatgacgcactcctgctcggttggagcttggcgaccttccctgatcaatatgatatcttccactccagccagtcgaaagcgggcttaaataacatatggtacaaaaacgaagaagtcgataagcttctcgtcaacgcgaaaaaactgaaggatcggaaagaatattcgaaagcttacgagaaaatttacaaaatgattgccgaagatcagccgtatacattcctgttctattataactaccaccgggcgatccctaaaaacctgaaaggcttcgaatttcatccgaaaaacgatttctatgaagtgaacaaatggtggctgaaaaaataatctaatattctctaaagggagaggggatgttcctctccctggtttttaaaatccatgataaaaggggaatagaagatggttacatacattattcggagaacgctgatgtctattccgatcctgtttgggattaccattctttctttcgcgatcatgaaagcggctcccggtgatccggtgtcactgatggtcgatccgtccattaaacaggctgaccgcgagaagttcatcgaaaaatacggactgaatgagcccgaacatattcaatatttgaaatggctcggcaatatgatgcaaggggactttggcacttcgatcgtcaggaaaggaacgcctgttatcgatttgattcttgccaggcttccgaatacgcttttattaatgcttgtatcaacgattctggcgcttctgatttcgatcccgctcggcgtgctctcggcgaggcggccctattcaaagcttgattacggtattacgtttacgtcttttatcggacttgctgttccaaacttttggttcggtttaattttaattatggtgttatccgtgaatttaggctggtttccgaccgggggcgttatgacgctgaattcgggttttagcttgtgggatcggattcatcatttaattttgcctgctttcgtactcgccaccgcagatatggccgggcttacgagatatacaaggtcaagcatgctggatgtgctgcgccaggattttatccggacggcaagagcgaaaggttttaaagaaaatcgggtcgtgtacaagcatggactgcggaacgggctgctcccggttgtgacgattttcggactgatgattccttcctttatcggcggtgcggtggtgaccgaacagatcttcagctggcctggactcgggaagctgtttattgattccgcgtttcaaagagactatcccgtgattatggcgatgaccgtcatatccgctgtactggttgtcatcggcaatctaatagcggacattctgtatgcgatcatcgatccgcggattgagtattaagaaagaggggagtaaatcatgacacagccaaatccacaagtgccttcagcggagatcggccttcaagaaaacgtttcgcaaaaaccggaaacgatgacaaaaatctttttcgagaagtttttcaaaaacaagctcgctgtcatcggcggaattctcttgcttatcattgtactgtcggccttgtttgcaccgctgattgctccatacccgccggaacagcaaaatctgatgaacaaattaaaagcgccgagcgcggagcatttgatgggaacggataaattcggccgggatattttcagccgcctgttgtacggcgcacaaatctcgctgctcgtcggtttcgcgtccgtcctcggttcgatcaccatcggcacggttgtcggggcgatcgccggctatttcggcggaatcattgatgccattttaatgagaattgttgatattatcttatccatacccgacatctttctgttaatcacgctggtcaccatcttccagccgggcatagataaactgattttaatatttgccttgacgagatggacgacgacggcgcgcctcgtgcggagcgagtttttgtccttgaggtcgagggagttcgtcttggcggcgaaaacgatcggcacaagaaattacaaaatcattttttctcatattcttccgaatgcgatgggtccgattatcgttgccgcgacgctttccgtcggtaccgtgatccttgcggaatcggcattaagctatcttggattcggggttcagccgccgatggcaagctggggcaatatgcttcaggacgcacagaactttacgattatgatccaggcgtggtggtatccgctgttccctggcctgatgatcctgctcactgtgctgtgctttaacttcttaggcgacgggctccgcgatgcgcttgatccgaagaatattaaatgatctgtgcagtgtattatagggaaagtttaactttcaacgaatctttgtaaacaaaatggtggacattgaacgaatgtccctgtgagtcgatgaaggacacttttataaatgaggtaccaaaggtaaccatctttcgaaaacctttggtatctcactttgttctcagtgaataatttcacctcaaatctttagcaatattgaacgtttcacttacataaaatcctccaagaattttcttctaacatcctcttaggtgaccacatgcagatataaagatcaataacatgagcaaaaattattaagaagatgtgaagcttgctttggcagagttgccggccttttaagtttaagtgaaacggaatgatctttttatgttcttacaagcaagttcatggaattaaagcatcatgtaggcctgaagatcttttggaactgttagatgaagaaatgggcgctgtagcaaaaaaataaatcgctttgttaaatgaatagaggttttaacgatgttaagtgtattgaaaaataaaaactttttattcttgatattggggcgtttggtaaccaatattggggacagtatgtatacggttgcggcaatgtggcttgtgtttgatttatcaaaaagtacattttattccggattagctggttttttaacgatgttccccactgttttgcagtttttaacaggtccgattgttgataaagtcagattaaataaagttttggtttggagtcaactgattcaagctattctggtgttgattattccgtttttttatttcattggttatttgaacatttggattatcatgatgattatgcctcttatcgtattcattgagcaatttacttatcctgcgcaatctgccgcactgcctaaaatcatcaaaagtcaagatctggttaaagcaaactcacttatgtcattttcatatcagggtacagatattatatttaccggtattgcaggtattgtgattgcttcggcaggagctataagcatatacttagttgactctttcacttttttgttagcggcgctgttttttaagtgcgtaaaattagaacaaaaaagtgagatccaacataagccccgattccacttcaaaaaagtaatacacaattatacaacggatataaaagagggatttacactcattcgtcattctctcattccaaaaatcctcttgggctcgatgatttccaatttcatgcttagtgcgacgattgtgattttgccaagcttctcttcgattagaggaggagaagaatactatggatattatttggcttcaatgtcatgcggcttactgataggttcaatattcgcaacatggtttggtcgattcgctataggatcacttacgatatacggatttttcatttcaggggttttatggagtatttcggcgatcgctacctcttcatacatatcgattattttatttggtttgtctcaaatatccatcggcgtgacaaacgtcattttcatgtccattttgcaaagcatactgccagaagagtttatagggagagttttttcttttatcgcaagtttgacaagcatagcagctccttttggatctttgctgggagggtttactgcgtcattgatcggcagcgataaggttttttttataggaggaattgccatgctgtttgtatctgtttattgggtgtttcagtcttctttaagatcaattccttcatctgaaagaataaacgctaaagaatatagcttttttacaaacgtgttgaataaataatgtgtgagtttggccggaattgcttcattcagtcgtgatgattttgcctattgtctggactccgcgatgcgcttgatccgaagaatattaaataaaaagctgaggggtgccgcccttggctttttttgatcgcaattgccataatctcagccggttggaataaattccttcccccttgcctatactgtggacaacagtttttattaaaagtgaggggttagaaatgttatttcttcatgatgtgtgggtgaattggtttgagggagaagaaaatggctacaacgtctgccactttcatgaatggcggaaggaagacagtgttgaattgcttgaccaggtgcctttgttaagggtgtcgtctgttttgtttcactacatagaaaatgatttgtcagagcttccggccgaattattgaatgatgttcatcaaaaagcatatattcgcaaaaatcatgagcggacacagcttgatcattgtttcgtcgtaacggacggcatcggtattcttgcggtcgatacggccggttatacaataccggtaagaaaaagccgcctcatcccgagacaggagcagctcgtttatgaaatggtgaaggacgttgaagaggaaacttacgattttgcaccagagaagctgcaaccttccaaagaataccacattttatccttatcaccggagcatgtcagaggattaacgagaaaagaacgccagctcaaacagctgctgttcatggcgctcgatcagctcaaagggctccaaaaccgggccgagatcgcctattggtacaccgaatggaacccgtatatgtatgaacagatcaagcgcatgacatttgaagaaatttgggacatgcttttcaatgagacgatcgacggatggtcagacaagcacagggacttttgtgaaaatttgattaaaggacagccgttttttgaaaagctttgggaaattgagaatgagtctaaagtcaactaaattaaaataaagactgccgagagtgaggcggtctttttatttggaaaagcggaaattctatattaaaaaataaaaaatgtgagctgtctttctgacaaagcggtcaacgaaggactgtagatatgtgttttgaatcatttattataggagtatcgtgatccgaaggcaggtgaattcggagcggcggctgttctctatgaaaaacaccttctgattgttcgataatcagaaggtgttcttgaatcagcgtctttttcggccgagccccattgcattttccatttttttcagcatcttgtttgcggtttgatttgcgcgttctgcgccttcgtccaaaatccggtccagctcttcagattcgatcaattcgtggtagcggtcttgaatcggcttcagcgcgccgatgacgacttcggcaaggtctgatttaaattcgccgtagcctttgccttcgtatttcgcctcaagctcttcgattgagacttgtccgagaatcgaatagatcgtcagaaggttggatacaccgggtttgttttctttatcatatttgacgattccgtcggagtccgtgacagcgcttttgatttttttctcgagctgctttggatcatcgagcagggtgatgaacgctttttggttcggatctgatttgctcatttttttgagcggatcggcaagcgacataatgcgggcgccgactttcggtattttaacctccggaaccgtgaagatgtcattgtatttcttattaaaacgctccgccaagttccgggttaattcaagatgctgcttctgatcttcgccgacagggacgacgtctgttccataaagcaggatgtccgccgccattaatggaggatatgtcaaaagcccggagacgacggcttcttttccggctgatttatccttgtactgcgtcatgcgctcaagctcgccgatgtaggcgacgcactgaagcatccatcccgcctgggcgtgtgcaggcacttccgattggataaacagcgtcgcttttttcggatcgaggccgaccgccaaatacagcgcggcaaggttccggatgttctttctcagcgcgagccggtcctgcgggactgtgatcgcgtgctgatcgacgatgcagaagtaacagttgtagtcatcctgcaagtcgacaaactgcttcatcgctccgatatagttgccgagggtgacagagccgctcggctggataccggaaaaaatcgtttttttcatgtgaatccctctcttttcatttcaaaataaaaaggcccactcttccctcaaaagaaaagggacgaatgaaccgtggtgccaccctgattatttcattatggtcaaaatgaaatcgctctagacgtttgtaacggagtcttctccggctgagcctacttatccgtgttcggtcagctgctcagaagcccattccacattcgccattatccgctcccagcaccgcggactctctttaaatggggagaaatgtgtactcttcttcttcatcgcatgttattcataattttattatatataaattttaaatgaaagtcgacaaccccggggaaaagaaaacgaataccgggctgaataaagttggcgcggcatcgttcggttcgatataaagaatggcgaatgttatacgtgtaaaacgttttaacatgtaaaacattaactttccttttaatgtggttacgctttaaaacagagaagtgtatttgtacatttggtagaaaacctgacaatcataaatagtttgaataaaaaaataattgaaaattaatattgcaataaattattctattaattataatgaatttgttcacctcggtgttacaggtttcttacataacaaatattcagaaaagacgaaacagaggaaaaagtatggcaagtgggcctattacttttttatgataaatctgaatgttcaggagtaaggaactaaaaaaacaagaaattgggggggtttctctttgaaaaagcgtttgtcatttatcagtttaatgctcattttcacactcgtcctcagcgcctgcggcttcggctcaagctccggtgacggcggtaaaaaagacagcaaagggaaagacacattaaatgtcaacattaaaacagaaccgttttcactacatccgggactcgcaaacgattcggtgtctgcaaacgtgcttcgtcagacttttgaaggattgacgaccatcggcaaagacggaaagccggttgaagcggcagccgaaaaaatcgaagtcagcgacgaccagaaaacatacacattcacgctccgcgacgcgaaatggtcaaatggagatcctgtaacagcagaggattttgaatacgcatggaaatgggcgctcgaccctaaaaacgagtcgcaatatgcgtatcagctttactacttaaaaggcggagaagcggcgaacaccggcaaagggaaaattgaagatgtcggcgttaaagctgttaatgataagactttaaaagtcgagcttgaaaaaccgacaccgtattttactgaactgacggcattctacacatatatgccagtcaataaaaaggtagcagagaagaatccgaaatggtacacaaacgcagacgagaactacgtatctaacggacctttcaaaatggcgaaatggaagcacggcggtaacatcgtgctggagaaaaacgaccagtactgggataaagacgctgttaagctgaagaaaatcaatatggcgatggtcaacgatccgaacacgggtctgaacatgtacaaaaaaggcgagcttgactttgtagggcagccgcttgatcagatttcaacggacgcgattccaagcctgaaaaaagaaggcctgcaaattgatccgttcgcatcggtttacctgtacaaattcaacactgaagcggctccgcttaacaatgtcaacattcgtaaagcactgacatacgcgatcaaccgcgaagcgatcgtcaaaaacatcacacaagcggaacagctgcctgcgatgggattagtgccgccggcggtccacggctttgaatccaacaaaggctatttcaaagaccatgatgtcgataaggcgaaagaacacttggaaaaaggcttgaaagagctcggtttgaaaaaagcgtcagaccttccgaaaatcacgctttcctacaacacggatgaagcgcaccaaaaaatcgctcaagccgttcaggaaatgtggaacaaggaactgggcgtagatgtggaattaggcaatgaagaatggaacgtttacatcgataagctccatgccggaaactatcaaatcggccgtttaggctggaccgccgactttaacgacgggatgaacttccttgaaacataccgcgacaaagaaggcggaaacaatgatacgaactgggaaaacgcgaagtataaagagctgctgaataaagcatcaagagaaactgattcagcgaaacgcatcgagctgatgaaagaagcggaaagcatcatcatggatgagctgccggtcgcaccgatctacttctacacaatgccgtatcttcatgatgaaagcttaaaagactttgttctgaccggtacaggtgagatctatttcaaaaccgcgcattttgaataaaattgcatgaaagtatatggggcttagactttccccccatatacttttatttatgaaaagaagttaatagactgaatattcggaggtgtgtaaaattgattaaatatttaggccgtcgtcttgtttatatgttaatttctctctgggttatcgtaacagctaccttcttcctgatgagagcgataccgggcggacccttttcaggcgagaggaaacttccccctgcaattgaagccagtctcaattcctactatggtttagaccagcctctttttaaacaatatctcgattatttagtatcggtagcaaagtgggatttcgggccgtcatttaaatataagggacaaactgtgaacgacttgatcagctcagggttcccgatttcttttacactcggattggaagcgatttgccttgcgctcgctttcggcgtattgttcggcgtgatcgccgcgctgaagcgaaacaagtggcaggtttacacagcgatgatcattgcggttgtcgggatctctgtgccgaacttcatcatggccgcgcttctccaatacgtgctggcaatgaagctgggcatgtttcctgtcgcgcaatgggagtcatggggacatactgtgcttcctgcaatcgctgttgcctcgatgccgatggcgtttatcgcccgtttgacgcgctccagcatgcttgaagtgttgagcagcgactatatccgcacggcgcgtgcaaaaggtttgagcacatcagccgttacgtttaagcatgcgatacgaaatgccatcatgccggttgttacatatatgggcccaatggcggcgtccattttgacaggaacgtttgtcgtcgaaaaagtcttcggtataccaggactcggcatgcactttgtcacaagcattacgaaccgagactatacggtgatcatgggcgttaccgtcttcttcggggcaatcttgctgctttgcgtcttgattgtcgatcttttatacggcttaattgatccgcgcattaaattgtttggcgctaagaaaggggagtaagaggatgcagcaaataccaaaagacatgtttgaacctgcagctgttgaccatagcgaagccgaaaagatctcaaagaaaaacctttctttttggacagacgtattcttgagatttaaagaaaacaagctggcgctgtttggactggtggttctgatcctgatcgctctgatggctatcttcgcgccggtgttctcaagctttcaatatgaagaaacagatttaacgaatgcgaaccagccgccaagcggtgagcactggtttggaacagatgaccttggaagggacgtattcgtccgtacatgggtcggcgcccgcatctcgctgacaatcggactcgctgctgcgctgatcgacgttttgatcggtgtgatatggggtgcgatttccggcatcagaggcggacgtacggatgaaattatgatgagaatagcagatgttttatgggcgattccttctttattaatgaccatcctgctgctcgttgttatgggaaaaggcctgatcacgatgatcgtggcgatggttattacgggctggatcaacatggcgagaatcgtccggggccaagtactccagcttaaaaatcaggagttcgtactcgcctcaagaacattgggagcgaaaaactcgcgcattatcagaaagcacctgctgcccaacatcatgagcccgatcttggtcaccatgacattaaccgttcctacggctattttctatgaggcgtttttaagctacctcggcctcggggttccgcagccgcttgcaagctggggaacgatggcaacagacggtgttcagggattggaatactacccttggcgcctgttcttcccggctacttttatctgtctgaccatgtttgcattcaacgttatcggcgacggactgcgcgacgctttagatccgaagctgcgtaaataaaggagtgagaaagatgaaacacttacttgaagtgaaagatttagccatttcttttaaaacatacgccggagaagtacaggcgatccgcggcgtcaactttcatgttgacaaaggagagacgcttgcgatcgtcggtgaatccggatcaggtaaaagcgtcacttcacaggcaattatgaaactgattccgatgccgccgggctattttaaaaacggacaaatcttatttgacggacaagacctggttccgaaaacggaaaaagagatgcagtcgatcaggggaaaagagatcggcatgatctttcaggatccgatgacttctttgaaccctacaatgaaagtcggccgccaaatcacagaagtgctgtttaagcatgaaaaaatctcaaaagaagaggccaataagcgggcggtagagcttctcagccttgtcggaattccgatgcctgaacgccgcgtcaaccagtatccgcacgaattcagcggcgggatgcggcagcgcgtcgtcatcgcaatggcgcttgcggccaatccaaagcttttaattgcggacgaaccgacaacggctcttgatgtgacgattcaggcgcagattttagagctgatgaaagacctgcagaaaaagatcgagacatccatcatttttattacgcacgatctcggcgttgtcgcgaacgtcgccgacagagtcgccgtcatgtacgcgggacagattgtggagatcggtacggtcgacgagattttctacaatccgaagcatccgtatacatgggggctgctggcttcaatgccgagccttgacaatgacggtgatgaggaattaatggcgataccgggctctccgccggatttgaccaatccgccgaagggcgatgcctttgcgttaagaagcccgtacgcaatgaaaatcgattttgaacaggagccgccgatgtttaaaatatctgatacacattatgtgaagtcatggcttttgcatccggatgctccaaaagtcgagcctccggcggctgtcaaaagcaagatgaaggagtttaaaaatcagtatgaaaaaccggttcaagtgaaagaaggtgaatgacatggcagaaaaactgctcgaaatcaagaatttaaaacagcacttttcaacgccgaaagggattgtaaaagctgttgacggaatctcttttgacatttacaaaggggaaacgctcggtcttgtcggagagtccggctgcggaaagtcgacgaccggccgttcgatcattcgtttgtatcaagcgacttccggagaagtcttgtttaagggaaagaatgtccacgacaaaaagtctgccaaggaccttctcgaattcaaccggaagatgcagatgatttttcaggacccgtatgcatccttgaatccgcggatgacggttgccgacatcatcgcagaaggtattgacatccacggtttggccaaaacgaaaaaagaacggcttgagcgcgttcatgaactcctcaatctcgtcggcttaaataaagaacacgcgaaccgctatccgcacgagttttccggcggacagcgccagcggattggaatcgcaagggcgctggcggtcgaaccggaattcatcattgccgatgaaccgatctctgcactggacgtgtccattcaggcgcaagtcgtcaatttaatgaaggatttgcaaaaggaaagaggactgacataccttttcatcgctcacgatctgtcgatggtcaaatatatcagcgacaggatcggcgtcatgtatttcgggaagcttgttgaattggcgccggcagatgaattgtatgaaaatccgcttcatccgtatacacaatcattgctttccgccattcctctgcctgatccggattatgagcgcacgcgcgtgcggaagacgtatgatccgtccgtccatcagctgaaaggcgacgaacagatggagctccgcgaagtaaagcccggccatttcgtcatgtgtacagaggaagaatttaaagcctatcaatccaaataaacgaagcaggaagacagccgtcacaaggctgtcttttttgatgcagaaccacagccggcaatttttttgagaaaaaatttgaaaccttagcgtaagacaaccgtcttagtatatgtaggtaacatgctcagcttcaatgaagctcctttctaaaaaagattttgtttaaactaaaaagaaagcgggtatatctaaagtgtgaaattagaacatccataaggagcaaatcaatgaactggtatgagaagcttagcgagtatttccctattgaagaaatgaaatcaaaagagcatatggaagcattgttaaaggaacaaaacgatatttaccataaagaagaaggccgtcatcatgtgttgatgtacgccgaattcgactcttttattttcatcgactatttattcgtttctaaagacgcacgaggacagggacttggatccaagctgattgagaagctgaaaaagaaaaacaaaccgatcctactcgaagttgagcccgtggatgaagatgatgccgatacggcgaaacgtcttaaattttatcaaaaggaaaactttaaacacgctgagtcgattggttaccgccgccggtcactcgcaaccggcaaagtgaacaaaatggagattctgtattggtctccaaaatcaaacacagagaaagaagtgtttgacgcgatgaaagaaacgtacgaaaaaatccatacatacaaagatcaaaaatggtatggagaatcttatgaagatgtggatgacgtccttacgattgttgacgatcataaacagaagaacattttcgatgaattaagctaaatgagaataagacctggcataaaaaagcaaaagtcgctggattgtcaaaaaatttctgttacagactgttcacacttacttttttatagtataatactcaataaagattacttttttagagttatttcaatttaagaatacgctaatttcattctactttttaaggagtgaagcaatatggttacattatatacatccccaagctgcacgtcttgcagaaaggcgcgcgcatggctagaagaacatgatattccgtttacggaaagaaatattttttcagagcctttatcaattgatgaaataaaagagattttacgaatgacggaggacggaacagacgaaattatttcaactcgttccaaagtgttccaaaagctgaacgtcaaccttgaaacaatgccgcttcaagagctgtaccagctcatcaatgaacatccgggccttttgcgccgtccgatcatcattgacgaaaagcgcctgcaggttggatacaacgaagacgaaatccgccgcttcctgccgcgcaaagtgcgcacattccagcttcgtgaagcgcagcgtcttgcaaactaaaagaaggctgaatttttcagccttcttttagttgtagacaaaatcgtttagattttgtcaacttttgattcagcgtgatccgaaaacctttgcagtctaggaaggccgagcatcggagcgcagcgaatgttggaattcgtgagcaccgacgcgcaggccctgacaacgaatgcgagggtttgtcggcacgctgagaaggctgaatttttcagccttctttttttaatgcttttcactcgtctgttcataataaatactggctaaaatcacaaaaataaccgtaaggacgggcagcagcatttcgagggtgctgtgctgcgccataaaggaagacaactcctgctccctgacgatcatttcgccgccagtataagccagcagtccgcttcctgcgtatattaagagcggaaatttggcaagagccgcttgaatcagcctgctgccccaaatgatgaccggaacggaaaccatcaggccgacaacgacaagcatcaggcgtccgtgtgaggctccggcgaccgcaatcacattatcaagggacatgaacaagtcggcaatcacgatgatgcggatcgccttaaataaagatgtcccgcctttgacatgctgggcatcttttttctcaatcagaagctgatatcctaagtacaaaaggaagattcctccgataaattgcagataaggaaccgcgagcaggtatactgctgccatggttagcgcgattctcatcatgatggcgatcaatgtgccgatgatgatcgctttttgcctttgccggggaggcaaatgacggcttgccattgcaatcacaacagcgttgtcgccgccaagtatgagatcgattccgatgatcacaaggaacgacatcagtatatcgtgttccatccactggcacctcgctttgcctttgcatcgggacttgctaaaaaggcccccgcattaatagctgctgcttgtacaactaatatatgaagcgggccggaaaatatgttagcttgaccttggaggcgtttttatttcttttccgccttttttatcataaaatagaaaataaagattgatcagggataaggttaagaagtggacgtaatgggtaaagtgtagtaaagtacaattaattgggagcttagttatcccttcaacatcttacaaagaagggaaggttggcaaatggaaatcgaaagaataaacgaacacacggttaagttttatatttcctacggtgatatcgaagaccgcgggtttgacagagaagaaatttggtacaatcgagaacgcagtgaagagcttttttgggaaatgatggacgaagtgcacgaagaagaagagtttgccgttgaaggccccctttggattcaagtgcaggcccttgacaagggattggaaatcattgtgacaagagctcagttgtccaaagacggacaaaagctggaactgccgattcctgaagataaaaaacagcatgtagcagaagaaagccttgatgctttgcttgacgactttcaaaaagaagagcaggcagaagagcagaaactgcagtttgttttaaaatttgacgattttgaggatttaatctcactgtcaaaaatgtctgtcagcggttgccaaacgacattgtactctcatgaaaaccgctattatttattcgtggatttcaatgaactgcctgatgaagaggtggaaaaccagctgagcattctgctggaatatgcctcagaatcaaagatgacgattcatatgctgaaagagtatggaaaactgattgcagcggatcatgctcttcatacaataaaaaagcactttgcataaaaaagccggtttcctttgaagccggctttaaccttctccgttacggggaaggtttttttgtgaactttatgaacaaaaagaatattatgcagttaaactgtgcacgaaaagacgaggaagctataatgaaagcgattacaataaagggggagcacaacatgacaaagaggggcagatgttacggctttacgattttacttgtgtttgcgctgattttgggaggatgcggcggaaacacggcttcaaataaagccgcgaatgaaaaagactttaagccatcgaaagcaatcgaggtcgtcgcgccagccggagccggcgggggatgggatacaacggccagaacgatctcgaaaatcatgggtgaagaaaaattgattgaaaagatggctgtcgtcaacaaaccgggcggcggtggagcgtccggatggtcgtatgtccaccgcaaaaaaggcgataatcatacgttgtttgttacatcaccgccgattttgttcgtgcctttaaacggacaatcccagtacggccacaatgattttacgccgattgcaagcgtgattgccgattacggagcgtttgtcgttcataaagattcgccttatcagtcgatgacagaccttgtggatgcgcttaaaaaagatccgaaagcagcttctattgtagggacgtcttctcctggaagcatggaccacatgcagtttgtcagcgctgttcaaaaggcgggcgttgatgcgaaaaagctgaaatatattacggctcaagacggcgcagggatgagcatgctgctcggcaaaaaagccgacgtctactcgacgggtgtcggtgaagcggccgaacaagcgcgagccggaaaagtcagagtgctggccatcaccgctcccgaacgcatgaaaggagataccgtcaaggatttcccgactttaaaagagcagggaatcgatgatgaatttacggtttggagaggatttatgggacctccgggaatgagtaagtccgccgtaaagtattatgaggaaaaaatcaaagagatgatggaaaaagacagctggaaatcgattcgggacagctatggatggacggataactttatgggccatcaagaatttaaggactatcttgacactcaatataaagaaatgaaagcgctccttgatgagattggattgggcgacaaataaaacggtctccgcgcgcggggttgccggtacgcagagcctaaaaagccccgcccggcacagcccgcgaccggcatgctgaaatcgagaaaggctggtgtaaaccatgagaatcacaaaccgggccgtttctgtcatcattttggctgtagcagccatttacctggcgctcagctttaatttagacagctatccgtacgcggtgatcgatgcggatgtgctgccgaaaagtttaggcatattgcttctcatattaggcatatttctgttttttgaaaaagatcaaaaggatacaacggtgaaaaagctgtttcagctgcagaaaaaagacgttaaggtcatgatgctttgtgttgtttctctgttgatctacatttccgttttagaattcatcggatttttgctatctactgtgatgctgctgctcgttttgcccgcggtgttgggatatcggaactggaaaacggctgcgatcgtttccctggttttcagcagcacaatttatttttcattcaattatgtactcaacatcatgcttccgcagggggttatgcctttttaatcgaacataaggagggaagtgaatgttagatagtattttatacgggtttcaggtggcgctgactctgcagaatatcatgttcgcttttatcggagtgctgatcgggacgattatcgggatgctgcccgggctcgggccgatcaccgcgattgccattatgatcccattaagctatggaatggatccggcctccgcgttaattttgatggcgggtgtctattacggagcggtctttggcggttcaacatcatcgattctgttaaatgcccccggagtggcaggcactgtcgcgacatcgtttgacggctatccgatggcaaagcaggggaaagcggggaaagcccttgccatcgctgcaatttgctcctttgcaggcggaacgatcaccgtagttgcgctgatgctcgtcgcgccgacaatggcaaacattgcggtgacatttgggccgacagaatattttgcattgatgatgctcggcttggtggcaatttcgagcctttccgaaggatcgacggtcaaagcgctgatctctgcgacattgggctttatgacggctaccatcgggattgatccgcagacggggaccgaacggtttacattcggtgcggcaagccttctggaaggaatcgattttctgatcgtggcgctcggtttgtttgcacttgctgaagttgcgtttttaatcaagacgcggaacaagccgatgacagagggagcgtctcaggtcggcagcctgaaggtgacgaaaagcgaaatgaaagagatttcgggaccgatcgcaaggcattcggtcatcggatttctgctcggcatcctgcctggtgcaggagcgacgattgcatcatttatttcttatattacggagaaaagaatctcaaaacatcccgaaacgtttggcaagggaaatattaaaggagtcgcagctcctgagacttcgaacaatgcggcaacgagcggcgcattcgtacctctcctgacactcgggattcccggatcagggacaacggccgtcctgctcggcgcacttttggtcgtcggcgttcagccggggccgctcatgcttacggatcatcccgacgtgttctggggcgtgatcgcaagcatgtatatcggcaatttatttctgctgattttaaatttgccgttaattcctttcttgtcaaaaattcttctgattccgaagcagcttttgatttcgctcatatttgttttctgcctgatcggcgtctacgctgtgacatttaatgtcgtacacctttatattctcgtgttcttcggaattctcggatattttatgagagtgctgtcttttccagcggctccgtttattttggcttttattctcggaagtttgatggaagagtcgttcagacaagcgatgacactgtcatcaggaagcctgtccgtgttttttgaaagtcccgtcacaatcggtttattgattacggctctattgtctctcatcgtgccgccgatttcccgggcaatgaagaacagaaataaaaagtcgatcgatttggaaggctaagctgtcgatgtccggaacgctacgtttccggactttcattttttacgggcttgtagcgccgttcgggccgcccgacggttccatagtaaagttctgtttttacatgcttttcggcagctaaaaattctaaatagcgccttgcggtcgtccggctgacaccgatggtgcgcccgaggctttcggcggtgatgccatcgctgttttcgcttttgtttaaaacgccggctacttttttcagcgtcagtccgtcgattcctttcggataatcggctttagcaatttgttctttcgtgatgctccgcctttttgccatcaggctgtcaacgtctgtctggtcgattgaagacatttcatttactttgagccggtaagaccgatagtttaacagcgtttctttcagcctggaaaacataatcggcttgatcaaataatcgacggctcccgcgcgaatcgcctgttcaacatattcgacttccttagccgccgtaatcatcatgacgtctgtatgcctgagcgtttgtctgatcagccagagaagctccatgccggagccgtccggcagaaaaatgtcgagcaggacaaggtcgggcttcacgtccggaagcaaatcttttgcatcttgaaaattttccgcgattccaatgacagaaaatccatcaattttgctgatcagtttttggtggatgtcagcgtttctgatgtcatcctctacgataaatacttgtaatgctttcataggtcagtcccccagcgtttctctattttggtatcacgacagtaaacaatgctccgccaaggtcgcttttgtccgctttaatttgcccgtttaacgcattgacggcttctttaactaaaaagaggccgaggccgcggtggtttgccgtttttgtcgaataaaacttttgaaagatccgctcctgttccccctcgggaataccgtctcccgagtcttcgacttcaattaatatgtgatctgcaccgtctgacaaaaagacaaggatgctgcggtcttttttgtgggaaacggcgtcaaaggcattctcaatcaaatttcctaaaatcgtaatgaattttcccttatccatttcgtccggcaaagcgttcaattttgagctttcatcaatttccaggttgatgtgcagctctttggcacggttgaccttacccagcagcaacccggaaagaagcggatctggaatcgaatggatgagaaattgcagcatatcctgatggcttttattctctttttgaatcaactcgagtgcttcaggatagctttccagctgaatcagtcccgcgattgtattcagcttgtttgaatattcgtgggtctgggctctcagaccttccgcgtattgcgaagtttgcgccagctttttggagagttcgtcaatatccgtctttctcctgaagctcgcaacggcgccgcggattttttcgttttcgaaaatcggcactctgttgacgattaattcttcgtttccgatcgttaattcctgatctttttgcgccgttttcgttttcagcacttcggggagcagcgtatccggaagaagctcggaaatcggtttgccgagccactgatcttcgctttcgacacgaagcagctcacacgcttttctattcaaaagcgtgatttcttcatgtttattgatggcgatcaaggcctcgtgcacagattctgtaatcgcctgcttttcagtatataattgattaatttcataaggctcaaggccgaaaatggactttttgacattgcgggaaatatagacggctcccaaaatccccatcagcacgacaaatcccaataaaaatatgaattttgactgatattgatagacgatgtcctgaatattttctattaaaaaaccgactgagatgatgccgacgatttcgccgttttcattatggatcggcgctttgcccctgatggccgggccaagcgtgccgacggcttccgaaacgtatgcttcacctttttcaagggcgcgccgattgtctccgccgaccattggtttgccgatttttccagggtccggatgagcatagcgaatcgcatccgccgagccgatcacgatgtattgcgcaccggactgttttctcgcattttctgcaattggctgaagggttcgagacggatcgtccgtttcaaacgctttctgaacggaaggcatgtgggcgagcgttttcgccatatcgagcgctctggcctggatttgtgtttttaaagaattttctaaaataattaaatagaggccgctcatgacagaaagcaagagcaaaagcagggtaagaatcagcaatgtgagcttggtggtcagcttccgtttgatgtcaaaaactccttttctcaaaatttcgagttctataatactactttatataaaatcggcctggatttgaagcgttttcaaataaaggaaagctcccgccaatgttgaatactagatcaaacaggaaggagagataatatgttcagtgcaatgatcgatcaaggcgggaccatctgccttgccgacggatacaaagccgaagatctcaagcgattgagaaaaagacatgcattttactgcccggtgtgccggtgtgaactcgacctgaaaatcggttccgtcaagcttccgcatttcgctcataagccggatgcagcatgtccggtgccccatgaaccggagagcccctatcacctgaaaggaaagcggctgttgtacgaatggcttggcagacaaggactccgcccggtgcttgaaccgtatttgcaagagatcagacaaaggcccgatttgctgctggaacacggaacccgccaggttgcggttgaatttcaatgtgcgaatctcaatgccgcagcgtatcgcaaaaggacggaaggctttctcagactgggaatcgagcccgtatggattctcggcggaaaccggataaaacgcttgacgggggatttatttcagctttcgcggtttcactggcagttcattcagaaaagcgacaagcccccaaagctcctgtttttttgccccgaacaaaaggctttcatcatcctcgaacacctcattccctttcaaacaaacaaaacatccgcatccttgcgctttcttcctcttgctgaagcaagctggcgtaatgtaacagaacgagaaagccgttcgcctctccagctcaaaggctggaaaaagaacatcctcagctttcggatgtcggccgtgcgttttttatcaaaagaaacgaagcagattgccgccctcttttatgaaaatcatcagcttccgctcccgttttttccctcagaagcctttctcccggtgccgtcaggctatatttttgcccacccggtttatgtatggcaagggtacctttttttatttataacgaagcatgatacgtttcgcctgcagtctgcgcttcactatatggactggctcatcaagggcaaaaggctgaagctgagatggagcgggcggcaaacggctgcggatgccgtcggtgaatacatttgttttttgcataaaaaaggatttttggtgaggaaagaggaattttattattccgagggttcttttgttccggagccgcggttagaggcgctgttaaaaagggatgaacattatttttccgaatgattatcaagcctttcgttcaatctaaagaaaggaaggtggtgtccggactgtttcagatcaaaagatatgtattttattttttaacggcgggattttgtgtcttttttttcgcatatgatttgacaaaagacggtgaaaaaacagaagataaacacaatacaagtttattggctaacaatggacttggagtaaagaaagcgaggggattgacagtggctgaagaaaaaaaatcgaagaaactgccttcaagagaagaggtgaagcaagaagacacgtggagactggaggatatcttcccgtcagatgacgcctggaacgaggaatttcaagccgttaaagaactgctgcccaagctttccgaattcaagggcaagctcggccattccgccgatgatttatatgaagcgctgacttatcaggataaggtgatggagcgtctcgggaagctgtatacttacgctcatatgcgctatgatcaggatacgggaaattctttttaccaaggtctcaatgataaagcggcgaacctctatactcaggctgcgagcgccacggcctacatggtgccggaaatattatcgattcaggaagaaaagcttcagcagttcctgttggaaaaagaggaattaaagctttactcacacgctctcgaagaaatcaataaagagcgccctcatgtgcttagcgaggaagaggaagggattttggccgaagcgtctgatgttctttcatctccttccaatacattcggcatgctgaataacgccgatatggaatttccggagatcaccgatgaaaacggagaaaaggtgcagctcacacacggcaattatatcacctttttggaaagcgagaaccgcgatgtccgccgcgcggcattcaaggccgtttatgaaacatacggccgctataaaaacacgctagcttccacgctcagcggagctgtgaaaaaagacaacttttatgcgaaggttaaacattataaatcggcgcgggaagctgccttgtcgcgcaacagcattcctgaagaagtctacgacaatctagtcagcacgatcaacaagcatctcccgcttcttcaccgctatgttgagcttagaaaaaaagtgcttgagcttgatgaagtgcacatgtatgacctgtatacccctctggtaaaggattctggaatgaaagtcacttacgagcaggcaaaggactatatgctgaagggtctggcgcctttgggggaagaatattcatccatcctgaaagaaggattgaacaaccgctgggtcgatgtgtatgaaaacaaaggaaaacgaagcggcgcctattcttcaggaacttacggaaccaatccgtatattttgatgaactggcaggacaacgtcaacaatctgtttacgctcgtccatgaattcggccattccgtgcacagctactatacgagaaaatatcagccttacccgtacggtaactacagcattttcgtagccgaagttgcttctacgacgaatgaagcgctgttgggagaatacctgctgaatacaatcgaagatgaaaaacagcggctctatattttgaatcatatgctcgaaggctttaaaggaacggttttcagacagacgatgtttgccgaatttgaacatgagatccatgtcaaagcccaggaaggggaaccgctgacacctgagctgttaacgagcatatactatgatttgaataagaaatatttcggagacaatattgagattgataaggaaatcggtcttgagtggtcaagaattccgcatttctattacaattattatgtatatcagtatgcgacaggcttcagtgcagctcaggcgctcagccagcagattttaaaagaaggcaaatcggctgttgaccgctatattgagttcttgaaagctggaagctcggattatccgattgaagtgctgaaaaaagccggcgtcgatatgacgtcttcagagccgattgaagctgcgtgcaaaaagtttgaagagcagctgaacgaaatggaagaactcctgcaaaaagtcaatcattcataaaaggcgtatgcatgaaagaggctgccggtctaccggcagccttgttcgcgatgatgtcaaaaacctttaaacgttttgcggtggttgaggcggctgatcgtaaaaaggattgatataaataataggggagacgtaatataaaggggtagcatattcatcaaacctaaaatattcaagacgaaaaaaaataaaattgatgcaagtcccaaaatgatctgaagcataaaaaccctcctaaggactgataaaatattaagggggcgacgaagcgcaataagagcggaaaaaccgggcgccagtccgcataattcgcggtttggcagcgtgcgtcgggctcgttttctttgttactttgatcatatgatggacatctattatttatgtttttgtgacaaaaatgtgaaaactaatgaaatcagttgtcaaaactcgacatgatttgatattataaagatgtgaaattgatcacaaacaaacatttacccctttgtttgaccgtgaaaaatttctcccatcccctttgttgtcgttaagacataatagaaaccgcgcttatcccggcgcggtttcttactgctttaaaaaggaacgtgtgttcgttttttgtgcgataaaaaacacgggagaaacccgtgctatttttcgcattgatagagcggaccggcatcgtgatgttcatttatatagcgccagaacatgccgtgtttcgcttccactctttcgactttgcgggcgaacgcgagctttttcatttcccgttccacctgttcaagcgtccagtcgtaaacgacggcaatctctttgtcggctacaaattgaaagtattcgataaaaagttcgagcggaggtgtttgtgaaggcttcggctcatcgccaagcatttcaaacaatacttcttcgtaaatttcatatgaataatttccggttacctttaagccttctccttcgcggaggctgttgaaaaacgtaagagtcggaacagatgccacttccatttcggcagcgatttttaaatcgcattgcagggctttcacggcgctctgcgaatgaagatcccttttgaattcctccaaatcgagctgcgtgtgctctgcaatcgctaaaagcacctgttcttcagtgatatcctgctgattgagaaacaagctttcctgcatgcatctcaaaaactgcagccctgcttttctgccttgcagttccgctgctttcaaagcgagcgaggcaaggtaaggtgcagagagtgctttgtcgtgcaggagcgttccgtcgcaagacatgcccgacctgcatgcgatcttttcccatgcctctgcgagccggcgctttttgcgtttctgaacgttcagcgctgtaatgctgcatgcggcgatgatccttagtgtgaaaaagcggccgtagcggattttcaactttttgatcgccggctccaatgcccagcattcgggagataaagggtcgacaaacatataaatttccatcggtttttgcggatgtccgtggcaatgggagaaaaattggtcacgctgattgagtgtcaatgtgaaccatcctccattttcggctgatttaccatatgtctggctgtcaatgtcagcctttcaaaaagaaattccctgatttcgccctttaaaccgacatgatccattgcctctttcatacacgaaagccatgcgtccgcccgttccggtgtgatcggaaacggcaggtgccgcgccctcagcatcgggtgtccgtgttcttctgtataaagcggcggaccgcctaaatattgcgttaaaaattgcttctgctttcttgccgtttccgttaagtcgtccggaaaaatcgggtagagcagcggatgccgctttacacgttcataaaaagtatcaacaagttgcgatagaagctcttctccaatcgcttcataaggtgcgttaaacgattgtcccatgttgactactccttttaatatggctaataggaaaatataccgattcctattgcaaaaaaatatttatcttgtgcatcatttattatttcacgattgtatatacttattttagcaacctcgttccatttctacaaacaaaccgacttctgcctgcgggcgaaaatcgctgttttgtttcaaatatcatatcatattcgcttcttaaatgtgtatttttaataccgggaggatgaaagaggaggtaaatgcaggaaaaaaagccggaaagcgtcctttccggcttaagcgtagtaatttgaggtgattttttttacataattttgcgtttctttaaaagggggaatgcctccgtacttttggacatttcccggtccggcattgtatgccgctaatgcgagcttcacatttccgctgtatttatcgagcatctgctttaagtattttgttccgccttctatattttgaacggggtcaaaagcgttattcacgccgagcgccttcgccgtggacggcatgagctgcatcaggcccatggcgccggccgggctgaccgctttctcttgatagcgtgattcctgcttgacgacggcatgaatcagtttctcatcgaccccgtatttttctgcggcgtttttgatgatctggtcaatgttctgattttggccgccgaaagagacgggtttcgctgcggcagatgggacggccgcaattgcctcaggcttttcagctgccagcggggcctgaagctgagacgctgtcgacacagtcggagcaaccgcgggctgtgaagactccaagccgccgacattgcttaaatattggtttaaaatcgagctgaaatcaaaacccgcatcttcggaaccgctgtctgaagccggataaaacgaccgtatcgcctgaagttccaagagagcggccaaatggttgatgttcattgttttcccaccttattgatctttaagtttttgctcataaaatcggacgattttgtttttggtttcacgctcagggatgacgccgaacgatttcagcagttcagagaaatcccgttttccgcgttcataatccgtcacttcgaattcgatttcaaagtcttctaccattaagtatcggctgtgatccaaaacaattaagccctgcggcaattttttttctgcacggcttgtcgcaagcgttccgaaaaggatgagctcgtccgcttcaatgccgagacgcttcagacgatcgtataccggcccatgcggaatcatgaacgtttcgatttcaggcttccgggtcagctcctggtgggtttccatcagtccgacaggcgccggttcttttaatgtcaggacaaatcgctgctgcttttcgcgaattcttagggcagctcctttttcttttaaagagaaggaaggcgtatcgtaataatggtttttttgtataacaaattgctcggaggaaaattgataatatgatttgattttctcaaattctttttttgtcagcatatttttaaattcgatttcaagttcctggctcattctttaattttttcatcctctcagctcgtaaaattgcattttccttattatctcttgagaaggaacgtttatcaatattgaagctgatatgataaaatgaatctgtacttttattgtaaaggagagcattatgcagaacagaattgagattacagaagccaatctgcgaaacgaccggctggtgttgaccagcgaaatcaatgacggagcggagcggaagccggccggacgcatgctgacagactccgatcattttgcatttgtatacatacttgaacaggacgaatcctttgaatacgtcattttaaacgaaggcatctggtccgatcttaaagcggcccttgacgccggtcttcctgtgtttttacatatcggaaacacggagctggagcttaacgggttccatgatgagctcggatatttaatagagaatattaaagataatgcaaattatggcgaagaaatggaagagagagtgaaacggatattcctctagaaaaaaaggcgatgaaattgggggaaggtttatggatgaaaaacaatgggagcagtttttagcgccgtaccggcaggctgttgaagagctgaaagtgaagctgaaagggatccggaccctttacgaatacgaggaagagcattcgccgattgaattcgtgacggggcgggtgaagcctgtgccgagtattcttgagaaggccaagcgaaaaaacattcctctgcacaacattgaaagcatgcaagatatagccgggctcagaatcatgtgccaattttttgaggatattcgcattgtcgtcgatatgcttttggcgagaaaggacttcacggtggtggataagcgcgactatatcgcggaacataaagagagcggctaccgctcctaccatctcgtcgtgctgtatcctttgcagacaatcaacggggaaaaacagattttggttgaaattcaaatccggacgctggcgatgaatttttgggcgacgattgagcattctttaaattataaatacagcggcaacattccggaaaaagtaaaattaaggcttcagagagcttcggaagcagcatcaaggctcgatatggaaatgtctgagatcaggggcgagattcaggaggctcaggcggcgttttcacgcaagaaaaaggatgaggatgacggttaggggagtgagatggaatgatgaagtttgcggtatcgtccaaaggaaatgcggtttctgattcattgaaaagcaaaattcagacgtatctgctcgacttcggtctcgaatgcgatgaagaagagccggatatcgtcatttccgtcggcggtgacggaacgctcttatacgcatttcacaaatacagcggccgcctcgacaaaacggcttttgtcggggttcataccgggcatctcggcttttatgccgactgggtcccgagtgagattgaaaagctcgtgatcgcgattgcgaaaacgccgtatcaaattgttgaatatccggttttggaagtcatcgtccgctataatgacggcagcgatgaagcgagatatttggcgctgaacgaatgtacgatcaagagcattgaaggaacgcttgtgacggatgtcgagattaaaggggaactttttgaaacgttccgcggcgacggcctttgtctgtcgactccttccggaagtacggcatataacaaggcgcttggcggtgcgattattcatccgtccatcagggcgatccagctggctgaaatggcgtcgatcaacaaccgggtgtttcggacggtcggatcgccgctcattctgcctgagcatcacacttgtttaattaaaccgataaatgatgtgacgtttcaagtcgcgattgaccacttgacattgctgcataaagacgtcaagtcgattcaatgccgcgtcgcaaacgaaaatatcaggtttgcccgctttaggccgtttccgttttggaaaagggtccaggattcctttatcggaaaaggagaataggaaggtttgctgtgagcgattttttgatgaaacagatcataacagaagaggacagcggggttcttttgaaagaatacgtccagcggctgggcatttcaaaaaggatgctgacggacatcaaattcggaggcggcgatcttttggtaaacggcgggcatgtaacggtcagatacgttcttcaaaaaggggacgagctcgtcattcagtttcctccggaaaaaatgagcaaatctttgcaaccggaagaagtgccgcttcatattttgttcgaagatgaccatgtcctcgtcttaaataaacagccatgcatttcgtcgattccctcgcgtgagcatccatcaggcagtctggcgaacggtctgattcattattaccagcggacgggcgtacacgcgaccgttcacctggtgagcaggcttgaccgcgatacatcgggtgtcatgcttgttgccaagcaccgcttcgcccactcgcttttatcggggctgcaaaaaaagggagccgtcaaacggcaatatcgagcggtcgtccacggtttgatcgcggaagagcagggaacgatcgatgcgccgatcgggagaaaatcatcgagcatcatcgagcgggcggtaatcccggacgggcaaaaagcagtgacgcatttttgggtgaacaggcgcttcagcggcatgacggatgtctccatccgtctggaaaccgggcgaacccatcagatccgcgtccatatgagtcatatcggatatcccttgtgcggtgatacgctgtacgggggaacccgcggcttcatcaatcggcaggcgctccacagtgagaggctgacattttttcatccgttcacaatggaagagctgacgttccaagcgccggtgccgaatgatatgagacagttgatagagagctgaataggctctctatttttatgcctccatgcggaatctagactcatcataaggcaaagaggagggaacagattcggttgtcagttccgggaatctgaaagcggtcagcctgttgccgaatacacaaccggtatcgatattaattgtatgatgaatcatcctcgggtttttgacgggagtatggccgtatacaacccacggctcgcctctgtaatgagcggcccagtcccgtctcactggccgtccgtctggcagcgtttcccctgtaatatctccgtagagcacaaactgttttacttttccgacaggctttttgccgatgtcttccgctttgatgccggcatgtgcaacgacaagttcgccgttatgcaggatctcgtaaagaggggcgttttcataaaggcgcatgaaaaggtctctgatatccttctgtttatgtttcggaaggtttctgtattccgccgccgtcgtctccagcccgtgctgcagcttcaccggattgcctttgaaaaaacggtacagcttattgcagtgattgccgggcacatatcgcacagctccttcttcaacggcccgtcctacaaattcaacgacctccagcgattttggccctctgtcagttaaatccccgagaaagacaagtgttctgttctccggatgaacgggaactcctgatgtcagcgagtagccgagtttttcaatcagcgcaatcatttcgtcatagcacccgtgaatatcaccgataacatcgtatttcatgcgttttttcgcctccagtccgtttgtttttcatatgtatatacattgtcccaagccgtataaatcaagcttctgcaactttctccggagaaaatcaggcatatttacttttttttcttgagcgagcattgttaaaatcaatttttacacctgtgggaaaagagtttcgacggttcttttcccacatgaaaatgtcaaaaatatgccccttttatttttaaaaaagggaacgctaatcatacccggaaaccggttttagaggaggtaccagtttatggagcacacatctgtctcatctttagttgtcgtactgattatcgcatttttaacacccatcctgctgcaccgtttcaggttaagcataccggtggttgtcgctgaaatcatcatgggtcttattatcggaaaaagcgggttcgatctggttgcccagcacgatacttggctcgaaactttatcgatgctcggatttatctttttaatgtttttaagcgggcttgaaatcgatttttccgtatttgaaaaaggaaagaaaaagcagctgcttccaagcggaaaggaagcgccgaatacatttaaaacggcttcggtcatctttattgccgtctttattttatcgctcggcctttcttacagctttgtcatggcaggatttattgacaacgcctttttaatgacgctgatcatttcgacaatttcgctcggggttgtcgttccgacgctgaaagaagagcgtctcatgaagacaaatatcggccagattattttgcttgtcgccgtcattgccgatcttgtcacgatgattctgcttgcagtgttcgcctcaatctacggggacgaaaacagcaatatgtggctgctgatgatcttatttgccgccggcgtcgttttatacctgttcggaaggatatttaaaaagcggccttttgtcgaagtgctgtcaaaaggaacgatccagatcggcacaagggcgatatttacgctgatcatcgtacttgtggcgctgtccgagtcgctcggtgcagaaaacatacttggcgcgtttttggccggggtgcttgtttcgctgctttcgccgaacaaggagctcgttcagcagctcgattcattcggatacggattcctcatcccgatcttctttgtgatgacaggcgtcaaattggacatttggtcactgtttggcaatccgaaaattttagtgatgatcccgcttctgtttgtggctctgttaatcagcaaagtcgttccggtgctgtttttgaaaaagtggtatgacatgaaaaccgtgctggcttccggttttctcctgacttccacgctttctttggtgatcgcggcgacaacgatcggcgagcgcatcggcatcattgacgcgcagatgtccggcgcgctgattttggtggctgtcattacatgcatcatcacaccgaccggctttaaaaaattaatgccgaaaacggaaagcgaaaaagagaaaaagacgatcacctttatcggcgcgaatcaaatgacgctgccggtcacgcttgaactttctccagaagattatcacgtcagaatcctgcatgtccggcaggaaaagaaggaagaaaagctggcggatccggtgtttgacgttgaagttttgccagattatgaatacgaaacgcttcaatcattcggcgttttccaaacggatatactcgtcgtggcgacaggcagcgaagagcgcaatacagggatcgccctttatgcgaaggagcagaaagtcgcgagaattatcgccagcgcagattccccagacgccgaatcgaggctgaaagaaaacggaattgatacattctccattctgctttccacgaaaacgctgctgcgcgcgcttatcgaggcgcctggcgttatgaaacttttgacgaaccaggatgcgtcgctgtatcagatcaatatgagcaatgagcgatttgacggcgtcctgttaagggagtttccgtttacgggagatgtcatcttcgtccggattttccgcggggttgacagcatcgtgccccatggggatacaaggctgcaaatgggtgacaggctgatcgccaccggttcgcgcgaatatattgcggaattgaaaaaaacgcttggagactgatgcttgaccattttgcaattcgtgataagattaaagtataaactgaatgaacaagaaatgttttccactaggggagtccttgataagggctgagataaaagtttgacttttagaccctcataacctgaacaggttcaaacctgcgtagggaagtggcacggtatttgagtatgtatatatgcaaattccaaaccactttccttgcgggaaagtggtttttttatgttcagaatcgaaggaggagccttgaaatgaagttttcagaagaatgccgaaacagcgctgcaacttggtgggaagggagttttgtccatccgtttattcaaggaattggagacggcacacttccggttgaccgatttaaatactatgtcatgcaggattcctactatttgacccactttgccaaagtccaatcctttggagcggcatatgctcacgatctatatacgacaagccggatggccgaacacgcgaaagggacatatgaagccgagatgtcgctccacaggaaattcaccgatctattgggcatcacaaaggaagagctggagtcgtttcagccgtcgccgacagcgtatgcgtacacatcgcatttgtaccgttctgtcgtcagcggcagttttgcggaaatactcgctgctttgcttccttgctattggctctattatgacgtcggcgaaacgctgaaaacgtgcaggcctgacaacgcgatttatcaggaatggatcgcgacatacggaggagactggtttaaaaaatctgtaacggaacagatcaaccgcttcgatgagctggctgaaaacgccgatgagaaaacgcgcgcgaagatgaaggagaatttcgtcatctccagcttctacgaataccggttctgggatatggcctatcaaaaagaaagctggtcaaaaagcggggtggatcagcttgcatctgcacgcgatcaccgatgacaagcactccgtggaagagctttcagcaaaaatcatctcgattcacgatgccgttgactttatccacatcagggaaaggtcaaaaaaagtaagcgaaatatcaagtttgatcgatcgcctggccgaagaaggcgttgataagcgaaagctcatcatcaacgacagggtggatattgctttgtttcatcatattcaccgggttcagctgccttcacacggcttttccgtcaaaagtgtaagaagccgttttccgcatttgaaaatcggaaagtccgtacattcacctgaagaagcggtgcaggctgaaactgaaggtgcagattacgtgctgttcggccacatttttgaaacggactgtaaaaagggccggaaaggaagaggagctctgagcttggcagaagtgaaggcggctgtccgcattccggtcattgcgatcggagggattaccgaacaacgtctggcggaagtcaaaatggcagacggcatcgccgtgatgtcggggatcttttcccatgacagaccgaatgaggcggccgcgcggcttgccagtctcgcgaagggagattcatatgagaaagcgctatgatacgatcgtgatcggcggaggcatcatcgggacttccatcgcttatcatcttgcgaaagcggggaaaaaaacggccgtgtttgaaagcggggaagtcggcaaaaaagcgacgagcgcggctgcgggcatgctcggcgcccatgcggaatgcgataaacccggtacctttttcgaatttgccagagccagtcaaaaagcctataagcgcctgacgggggaattgaaagacataagcggcattgatatcagaaggcatgacggagggatattaaagctggcattttcagaaagcgaccgcgaacacctgatgcaaatgggtgcactggattctgtggaatggcttgaagctgatgaagtatataaattagaaccgaatgccggaaaaggaattctcggcgccaattttatcagggacgacgtccatgtcgaaccggctgcagtgtgcagggcatttgccaggggagcccggatgctcggtgcagatgtcttcgagtatacgcccgttttatcgatagaatccgaagcgggggccgtccgcgtcacgtccgcttccggcacagcggaagcggagcacgctgtcattgcaagcggcgtgtggagcggagctttgtttaaacaaatcggcttagacaaaaggttttaccctgtcaaaggggagtgcctgtccgtatggaatgacggcatctctttgacgagaacgctttaccatgatcattgctacatcgttccgcgccatagcggaaggcttgtcgtcggcgcgacgatgaagcccggggactggaatgagcagccggaacttggcggaatcgaggagttgatccgaaaagccaagtcgatgctccctgggattgaatccatgaaaatcgaccaatgctgggccgggttgcgtcccgaaacaggggatggcaatccgtatatcggaagacatcctgaaaatgaccggattttgtttgctgccggtcatttcagaaacggcatcctcctggcacctgcaaccggtgagatgatggcagacatgatcctcggcaatccggtcaaaacagagtggatcgaggcgtttaaagcggagcgaaaggaggctgtgcacaggtgaacattcagctcaacggccggaaaatagagtggagagacgacggcggcacgatttatgatttgctcgcatcctacaatttggaaaatcgtgttgtcgttgttgaaaaaaacaggcggattatcggaaaagaccaatatcaaacggtcaaattggaagaacacgatgtcatcgaaatcgttcattttgtcggagggggataaaccgttatgttaaaaatcgcagatcgtcaattttcatcaagattattgctcggtacagggaagtatccgtcatttgagattcaaaaagaggccgtcagcgcatctgaatcggagatcctgacgtttgccgtcagacggatgaatatttttgaagaatctcagcctaattttttggagcagctcgatttaagccgttatacgcttttgccgaatacggcaggagcaaaaacggctgaggaagccgtccggatcgccaagcttgccaaagcaagcggtctttgcgacatgatcaaagtcgaagtgatcggctgtgaccgttcgcttctgccggacccggtagaaacgctgaaggcgtcagaaaccttgcttgaagaaggcttcattgtactgccgtatacatcggatgatgtcgtcctcgcgagaaaacttgaagagctcggcgtgcacgccattatgcccggggcctctccgatcggttcgggacaaggaatcatcaatccgctcaacctgtcgttcatcattgaacaggctaaggttcccgttatcgtggatgccggaatcggttctccgaaagatgcggcatacgcaatggaactcggtgctgacggggtacttttgaacacggcagtgagcggggcgaaagatccggtccaaatggcgaaggctatgaagtttgccgttgaagcgggcaggctcggatatcttgccggacgaattccggaaaagaactacggcatcgccagcagccctgaagaagggaagttgacgatttgaccggcaggtattcaagacaggagctctttcacccgatcggaccggacggccaggaaaaattaagccgcgcccgcgtcctcgtgatcggtgctggggctttgggcgcggccagcgcagaaatgctggtgagggccggggtcggttcgctgacgatagccgacagggattatgtggaatggagcaatctccagcgccagcagctctatacggaacaggatgtgattgatcatatgccaaaggccgccgccgctgaaaaaaggctgcgcctgatcaacagctctgttcaagtaaccggaatcgtagcggatgttactgcggaaaaagcgctcgagcttgcggaggaagcgtccctgatcgtcgatgcgacggataattttgaaacacggctgatcatgaacgacgcggcggtcaaattaggcatccctttcctgtacggcgcgtgtgtcgcaagctatggcatcacatatagcgtaattccgggaaaaacgccgtgtcttcattgtcttttggggcatttgcctgcgaataccatgacgtgcgacacagcaggggtgatcggtccggtcgtccagcaggttgccgcataccaggtaacagatgccctgaagctgctgaccgggcatgaaccgtcagggatgctccgctcatttgatatttggacaaatgagcggtctgaagtccgggctgacacgcttaaacatgagacatgtccgacgtgcggaaaaggcgagtttccgtttctttcagctgaaaacgaaacaaaagcagccgttctttgcggcagacaaacggttcagatcaggccggccgcggaacagccgctggaactggaatcgcttgctgccaaattaaaaaaagccggtttaaatgtgacgggaaatccttatttagtttcctgccgtgcggaggattttaagttcgtgatttttcgggatggacgtgctttaattcacggaacgaatgatatcaatcgcgcgaaaacgatatatcacaggtggattggctaaaaggccgaagggagtgcaaacatcatgagcatatataaagcattaacaatcgccggatcggattcaggaggcggagccggcattcaagccgacattaaaacatttcaggagcttggcgtcttcggcatgacagttttgacagcagtcactgcgcaaaatacaacaggggttcacggcgtctacccgctttctccggaagcgctcggcgcacagattgatgcagtggcagaagatttaaaacctgacgccgtgaaaacagggatgctgtggagcgcggagatgattgaggtcactgctgaaaaaattgcaacatatgagcttaaacgtgtgatcgtcgatcctgtcatgatcgccaaaggcggcgcttcactattgaatgaggaagctgttgaaacattgaaacggcgccttcttccgcttgcttatgcggtaacgccaaacattcccgaagccgaagtgctgacagggagaagcattcaaacaatggaagaccgcaaaaaagcagctcgtgacttgcatgaaatgggtgtccgcaacattatcatcaagggaggtcatcagcctgaggatggcaaagtaaccgatctcctcttcgacggagagacgttcacagaaaaaaccaattcctatattaagacgaaaaatacccatggaacaggctgtacatttgccgcggctcttacggcacaaacagcgaaaggaaacgggattcaaggagctttccgcatcgctgaggctttcgtccacgaagcggttgtacacagccttgattttggagccggccacggaccgaccaaccattttgcatatcaaaagttatccaacgcagggttggaactgtagtcccgcaataagaaagaatcaatatcgcggcagagcatcaaaaacggtctctgccgctttttattattctgaaattgtccagcctgctattaattgtgatactatatattatgatcaggtactaataaaatgttaatcattaggaggatttcatacatatgaatttatcactagaaggccggaatatcgtcgtcatgggtgtagcaaataaacgaagcatcgcatggggaatcgcccgctcgcttcacaatgcaggcgcaaggctgatttttacgtatgcgggcgagcggcttgaaaaatcggtcaaggagctggctgattctttggagcgaaacgattcaatcgtacttccttgtgatgtcactaatgaccaggaaattgaagcatgcttcgccgacatcaaaaaagaagtcggggtcatccacggcattgcacactgcatcgctttcgccaacaaagaagacttggctggcgaatacttaaatactacccgcgacggttttctgctcgcacacaatatcagctcctactctctgacagcggtcgctaaagcggcgcgcggcatcatgactgaaggcggaagcatcgtcacgctgacataccttggcggcgagcgcgttgtatccaactacaatgtcatgggtgttgcgaaagcatcgcttgatgccagcgtcaaatacttggcgagcgatctcggaaaagacggaatccgcgtcaacagcatttccgcagggccgatccggacattgtccgcaaaaggaatcagcgacttcaactcgattttaaaagaaatcgaagagcgcgcgccgcttcgccgcacaacgactccggaagaagtcggcgacacggctgctttcctgttcagcgacctttcccgcggcatgaccggcgaaaacctgcatgttgattcaggctaccatatcatcgcgcgataaaatagcgctaaaaaagcaatccgctaaaggattgctttttcttttcttctgatttctccttttttgcatatagatataccatgaacagatcggagggatcaagatgtctagcagaaaacacgatgcggagcaaaagccgctcatgtatattgtgcagccggactatgataaggcagaggcgaacatgcaggatattctgattaaaagaaagaagaaagcaaagcccgaagcttccgaacaaaaagcgcggcggaaggaacagcaggatgaagccgtccggcccgacgaaaaagacgaagctgaagcggtgtttaacgatgaggcgaatcgatccgaaaaaggagtcaaaccgattaaaaagccgctcagcaagatgacgattgccgagaaaatcgactttttggcaagccttcccggcaatatgccgaaaaccctttgtctcattgaagcagacgggaagacatacaggggaacgatcgtcggaaagaagggcgattccgtctttgtcagaacgtcgagcaaaggggctccggcggaactgccgatcgagagcattacctccttgcacccgctcggcttttaaatacacaagataaaaaaagtcccgattcagggactttttaatttgaacgattgatcagttttggatttaagcattcgatcgcacagtagcattccagatcgacttcaatgcagaaacttgttttttccaagcggaacacatcgcaaattttgtctttatcttctgtgaaatcgagaacacggcgattatcatcaaaggcaatcaacagtctcaatgtagcgcagcagtcatcaatgttttcaactctgaaaaacacggtgctgaagcaaggacctgcctgaagttctccgacatttccaaacgctacgaacggcttagacttagaagtgtataaaataaacggaatggtgtcgcctaagtgtctcgaaggggaaagcaggttgctgaagcagcttgtcgggcagccttcttcctcaatggcgttttgcagatcgtgaatgttttcaacggcttcgcacacgcaattttcggctgaacatttcgtcatgttatgatccctcctagttcaggatttaaaatttcgtttttcggcctggcctttctattggtaaaaggagctgccgaaagccggcagctttcgtgaaaagactggcatcaagccgatcatatcggccggcttgatgcagcctgacaccttttaaccgtggtggtgattgtgttttttgtctgctgcgcgatcaactaggtcaggtgacagacattgaatcgcacagaaacaagtcaagtcaacctcgatgcaaaagtccgtcttttcaagcccgaaaaagtcagggtcacaaggatggcagacgcttaatgtgtcgccgtttatgtccacaggcctcaggattgaaagcgttgcacagcaatctttgagactttctgcccggaagaaaatcgattcgaagcactgcatatcatctgaaaatccgccgacatttccaaatgttgaaaacagtccgccttttttgtcgtacaaaaggaacggaatcgtgtctttaccggaaaccgtcggactcagcaggttgccaaagcagcttgtcgagcacgctgttgtttcctcaacggcatcctgttcttttataatctgttctactgcatcgcatacacaattttcatgccggccatggtgttttccgcagctcatggatttcagctcctttttatagggatatttgactttagtctttaacaacatatgtacccgtgcccttgttggtgtgggtaatcgtctataaaaatgaagaaaagcagagctggttggctctgctttttgaattatagaaggccgacgataagggcggtgatggtgattacaacagtttgaacaaatgtgcttacgatgatagctgtgtctgtatcttcggttgtgacatgtacatttctggaattatcgatcaccaatttttgtctgttcgtttgtttattggcagttacctgcaacagatcagttgtgacaagttcggctagatcaggatcatcgataatggcgagaataatagtaacagctagtgtttgtgcagctgtcatgactgatgccaacgtttgtgtgtcttcagttgagacttgaacatcacaagagtctttaatgatgatcgtttcatctgagagctgtttgttaagatgaagttgatctaggtcagaatcgataaagccattttgccctttcctaccacagttgcaagtatagtcgtcacataattttttcttaggataactagggtgataatcgttgcctggatgttcgcattccgggtcaagcgcaatccatgaatatggtcttgtttccatttcttttcctccttccatttactattattaaatgttgtaactccttaacttgtataagacagataccctactacaaatccccatttttttctgctgaagtatctgactcggttgaattttccgctgttgctgtgttttcttgctccctccgttgtcgaagtttttctctcagtctatttgttctgtttcttcttcttcttggtctctcgccattttctgatgacgcatcagcgttcttttctctctttgtccctttttcattcggtgcggctgctttttctttctgtttttgaaccaaagcatcggtttgtttttttagatcttccagcatattgaaaatattttctttttcttcttctgagagcgtccgaactttatcgctggttactccccgatttttcaagatatttttaacaactgatttcattatcggatctacgttctcttgaagtttttcaaaatctgccaattgtttctcacctcaatttctttaaaaatattagaaagaaaggaaggcttaaagtatgtcaagctctgtgataagcgcgatcagcacttcggttaaaacttggacggaaagcaggatctccagcgaggaaagcgtaatggtgacattgcggctgccgatgactttgatgatgactcttctcctgctttgcagcctgtgtacggctaaaaggtgttctgagacaatgtctgctgtatcctcgtcttcgatcgcaagctgagccgataaaatcgtcaaagagatcacgatggcttgtaaagagagagctgctgttatgtttgccgtgtttaccgtgacatgttctgaatcaattacttcaatgagctggtcatattcccggtgtaattcgtcaaatgtttctgcgtacagcgcttcggctttttcatgaaacgacataactttcactcctttcttatccacactttattaaatgcagaccggtaccatagcggaatgagaaaaacatacatttcagcacccaaatttgctgttttagggaaggcggttccggcatatatttggaaacaggaagggggagccctgtgatacaaagctggtttttattttttttattttctatcgcggtatttcggctgacgaggctgattgtgttcgacacgatcatggcgccgtttagaagcctgtttcatgaagaggttgaagaaaaaaacgaaaaaacgggagagaccgaaacgtatcttgtcatgaaaggaaaaggcgtgagagcgtgggtcggcgagctgctgagctgctattggtgcacgggcgtgtggtgtaccgcgtttttgcttgttttttacgcatttgttccggtcattgctgaatggctgattcttctgctttcgatcgccggcctggctggagtattggaaacgatcgtttccaaatggctcgattgaatggggatttgtcattagcaacttatgaaaagaagactcatataatggcgtataagcatgagaaaggaaggaatgcaatgagacaagtgaaaagaaggcagcaaggccgattaacgaacgcttccagcaatcatcagtccactttctcaaaaaaagtgaagaaaaaaggctgcggatgcggcaaaaaaaagagaacctattaatatcaaaaaaagccggaatgcatccggtttttttgttgccaatttttcttctggtgcatacaccatcataaggaggggaagcgatgaatttatttgaacagctggttgaatcgatataccgcaaacatgatcaaactcaagccggccatgacaaggtgctctttgaacagcagaaggaactggagacatttgaccgctcggccgaacagttcggcaggcagatcgaagcgtttgcggagaatgccgaaaaatggctgggagaggacgggagtctgccaggcatttttaaataatccacagaagccctatgcatcaatccaagccaatcctatcaactgtcatatcgtgtagggagaaaaggaggtgctttagatgggcttttgttgcggaggctacggcggtggctacagcggcggctatggcggcggctatggttcaacgtttgtattgatcgttgtcttgtttattcttttaattattgtcggcgcttcttttaaatattagtttttgagttgaagcgaagagggcggcggcagcatatgtgccgggctctcttctttttgagcgggaaaagcacaaggcttttcaaacatgcataagatagcgtatcactcccaaaaaggaggcataggtatggacaatcaatttttcaaaaacatcgaaaagaaaacgggcgtcagcatgaatgacgtcatgcagctcgcaaattcgctgcaaaatgccaacttcaaggatgaaaatacggtccgcagcgtgattaagcgcgtcgctaaattggcgaataaacgggttccgaaggaaatggaagataagattgttgaatccattgtaagcggcaaagaaaaaatggatttcaacacgatcgcgaaaatgatgaacagcaaaaaataaacaccgcgccttccgataaaaggagggcacggtgtcttttattgcagctgaacttgtggattcgggcgtaaaataggctgtaaaaaccttgagcggtatgccgttcttccccttctgaaggaagggacgctgatatacaggcggtcctcagcccgggtcatggcgacatacagcagcctccgctcttcttcaagagcggtttcatcgccttttctcgctgtctccagggcaaagtcatgcggaatcgagccgtcctgcactcccagtatatagaccgttttaaattcaagccctttcgcacgatgaattgtcaaaagctgaacaccgtatccgtcagctttttgcttttccgcggctctcatatgatcgacatgctcaagaaattcggggatcgttttgaatttttttgccgcagttttgagatcccgcagatcgtcagaccctttttcgagcttgttcccttcgtttccgcgctttttcaggtaatcggaaaagcccatcttttcttctgcgaaagagatggcttcaaccggcttcatcgtttttaagcctgggaaaaaaggaacgattttttttattttatcaagctgaaacggtttaatgtcagtcaatttttcaagcgcctgaaccattgtgcaatcttctgtaatcgagagcgctttaagcgtgtttaaagcagactgcttgagaaagagggcgggtaaaatctgctttacggcttccgcgtcatcttgattttggcttaagtagagataggccagcatctgccggacgatcctcctgctgtaaaacgaccggacaccttgttcagccgtgtacggaatggctgactggtgcagacgttcaaaaatggcgcggccgctgctgtttgtccggtataggatggcgaagtcatcaggctttgcgcccatttcaattttttcttggatatcagagacgatcataatcgcttcttcctcttcatcataaggataaaataagagcggtttttggcggtcgtctctcgcggcgcttaatgttttcggaaaacgctttttgtttttccttacgaccatatcggcgcttgccacaatcggatggctcgatctgtaattcgtcgtgaggcggaccgttttcgccttcggataatctttttcaaaatcgagtataaaagaaggactgctccctctgaacgcgtagattgactgatcatcatccccgacacaggtcaggttgttttcggggcttgccaagagcttgatgatggcgtattgaacagggttaatgtcttgaaattcgtcaatcaaaatcgcgtgaaagcgcgtctgatatcgctttaaaatgtccggctgttcttgaaacagctgccagcacgcagatgccatatcgtcgaaatcgaattggcgccgcgctgctttttgttcttcataatgacggtacagccggtgaacccgcttttcccattcgtcttcaagcggaatctgttcacccggaagataagcgttcttccagtagccgatctgctggatcgcctggtcaaccggaaagtctttttcatcaagcccttcttcggcaagggccattttgatgtactgttctttttgccattcccatttcagcaggtgctcgccattccatttggccggatcatgatgataaagaattttgtaaaaaaagctgtggaaggtgcctgtcacgaggcggttcacagtctgcatcggcaaaccgtatagcgaggccatccgctctttcatttctttcacagcttttgtcgtgaatgtgacgagcaatatggcagaaggcgggatatcgagccgggatatcatataagccgctcgcgcggttaatacccgcgtttttccgcttcccgcgccggccagaacgagaaggggttcttcgggggccgtcacggcggcaagctgtttctcattcagcggcacattcggaaagaccggttccggagccgtttctgccgctggagagaaaggagaatggatggaagcttcgcgaggcggcgtccagaagtccgtgtccgccttcttttcctctccgatcgctttgcctttcgggaggcggaaaacgccgctttcagtataatcgttctgtttggtcttctgctctgtcttctcatttaagcaagccgcttcacattgagaaaaatccccgttttcccggtggaaaaaatgcggctcttcatgaattgacaatttcagtctgagcggcaagccgcaatatttacacgtgatcctgtcttttcttgcttcatcaaagaggaattgcaggtgttctctcgaatatgtatgtatatgaatgtctcggttattgaatcgggcgcatttcaaaaagaggtcctccaattaatgggtagtcgtctggtgtcatgagacaacgtctatcatatcaaatgaaaaccgtttaaaacagtagatttttgggaattaaagctgatgaggaggagatcgaatgggatatttgccgcctgtccgcaatgatcaatatatacagtatgccaatcgaagcatcagccaaaaatcgaactacgcttatatacaaaaaaccgccaatatcccaagcgagcgcgcctaccgcgaagtcgaaaaaagagaggaaaatcagactgcggcttttaggcgggtcgaggaaaaaaagacggaaaaaagcgctcaaccgccgtgttgcgaaaaaggcggaaagcgggcgcttcgtcaatgaatccgtttgagagatgaaacaaaccccggcttttataccggggttttcgttattttctgcgcagttttttgagtccgaaatacagaatgatcatagccgccgccccgagcatgatcggagtcgtgtacgttcttgctacattttcaacatggtcccaccggctgccgagctgtacgccgagatagacgaacagtatcgaccacggtatgatggccagcacggtcagacccgtgaattttaaaatcggcattttcgcaatgccggccggaatggagatggcgtgtctgaccacgggaatgaagcgggcagaaaagacgacgcctccgccgtatttctcaaaccatttttcggctgtttgaatgtgatgcttttggatcaataagtattttccgtatttgtataaaaacggccgtccgccgtagtagccgatccagtataaaaacaattgagcaatcgttcccccgatgacgccggcaatcacggcgcctgttatcgtaatcgagccgtttgagaccatgtatccgccgtaggcgagtacgatttcactcgggatgatttcgatcattaaaccgatcgcaatgccgaaatagccaagatcggtcagccacattaaaatatcattcactatgcttcccattttcgttttttctccctgcttttgatttcatcagccgaacgttggagcagccgccgggacgcttccctggcgcccgcccgcgggggaaataagcgaatctcaaaaaccgtccggatgcgctttgtgccattgccatgcgctttgaatgatggtttgcaaatcgctgtattgcggcttccatccggtatcttccatcagtgtccggctgtccgccaccagcactggcggatctcccgctctgcgctcgtccgtttttgctgcaatgcttcgctctgtcatgttttccgcggtttcaatgatttcttttacggaatgtccggcccctgtccctacattataaacattttgcttcagtctgtcttcatataatccatcaagggcagccaggtgggcgggagccagatcgaggacgtgaatataatccctgatgcaggttccgtctggcgtcgaataatcttctccgaaaatggacagctgctttcgctgtcccaaagccgtctgcaggacgaggggaatgaggtggctttcgggatcgtggtcctcgccgatcgctccgtttaaagcggcgccggcggcgttgaagtagcggagggcggcccatttgacaccgtgcgtttttccgacccagtgcagatatttttcgatcatcagcttcgattccccgtaaggattgacaggggagaggggagcagcctctttaatcggggctttctccgggatgccgtatacggcggcggttgacgaaaagacgatgttattgacgccttccttgatggccgtttcgaaaaatgcacaagactttagcgtgttttccctaaagtatatctcaggcttttcgatcgattcggacacaaggcttttggcggcgaaatggatgacagcatcgacatcatgatgtttgatgatggctttgacaagtgccgcatcagcgatatcgccttcgtaaaagctgaccccgctgacggcttccctgtgtccggtagataaattgtcaagcacgacgacggagcggttttgctttgtcaattcgagtacggtgtggctgccgatgtatccggctcctcctgttacgagtacggatgtcattgccatgctcctttctgcgcttctttttttaagacgctctccaggtaggcgagcagttttggccgcatctcgtcccgcatgagggcgatttccgtactcgctttaaagctgcccagcttgtcgccgatatcaaagcggcttcctttcaatttgcgcgcatacatgctttgttcccggcagatttcccttagtgcgtcagtcagctgaatttcatttcccgcgccgcgcttcgtttgttcgagcacagggaaaatcgaaggcctcagcacatagcggcccatgaccgcgatatttgaaggcgcatctttgacggtcggcttttctacgagatcgtcgatttgatacactttgttcttttgcgcggatgtctgaatgatgccgtatttgctcacgtccgctggatcgacgggctgaacgccgatcacttcggtctgatattcttcatatacttcgagcagctgcctaagcgccggtgtttctgacaccatgatatcgtcgccgaggaggacggcaaacggctcatcaccgatgaaatgcttggccgataacactgcatgtccgaggccgatgggctccttttgccggatataatgaatattcgccatatcggcgatctcgcgtatctcttttaacacatcgttttttcctttggccagcaggttttgctcaagttccacagagcggtcaaaatggtcttcaatcgaacgcttatttcttcctgtaatgataaggatgtcttcaatgcctgattggacagcttcttccacgatatattgtatggccggtttatcgacaatcggcagcatttctttcggctgcgcttttgttgccggcaaaaatctcgtacctaatccggctgctgggatgactgctttttttactttcatggttattcactcctggtcttttttatgaatctgcgccgggttcttgaaacacccaaagcttgtttccggtaaagttgatggccattcctgcgactgttgcggacatcttgctgataaaaagggacaggccggctttttgaaaaatgtacagaaggacaaatgtagcgcccgctgctgcaagattgatcatgataaaccggacgatttccgcgccatgcgctttttcttttacttgaaacgtccatgtccgattccagatatagctgtttgccacgcctgccgaataggaaaacaactgtgcggccaggtaggggacgtggagcgacgtaaggaggaaaaacacgacgaaatcaacgagtgtgttcccggctccgactgtcccgaaacgaacgagtgtggggatgttttttttgttcataacggcattcggctgttacctcccgtctattttgtgtagggctttgtaaaagcttagaaacaactttaatagacaatgttgaataaacgataaacaaaagatgaacaaactatgaaatgttttctgaggaaaagaaaaaccgttccgcttaaaaagcggaacggttactttttgaccattttgacatggggaatattcgcatctgaaaattcttcagacacgactttatagccgtgtttttcgtaaaagggaacagcctgtgtctgcgcgttcagcataaattgagacgcgccttgcttggcggcttcctcttcaagcgcctgaatgatcaggttgccgacgccgagggagcggtggcttttcagcacacagattcgttcaagtttgccgtagccgtcgacaagccggagccggccagcgccgatcggctctttttcgtcatagatgacgagatgtgaagattcctgatcaagatgatccatttcttcttccggtgatacgtgctgctccttgataaagacttcctttctaacaaagaaggcgtcttcaagctgttgttgattcttcacaatgacggcttccactggctttcttcacgctcctaaaataaaagtttcatagacggtccatgatccgttgtccaattggtaaagcaggtgaaagcggtcgatgacttcttcgtgtgacgcgtctctcattttcagcgtgccgaggacgtcggaatgctcatcatctgacagcttttgtgcgactgtgacatggggaacaaacgcgtattcgggtttgtcttccaaaacgccgctgtacattttttcatgaagctgcatcaattcctctgtcggttcggctttcatgtaaatgacattattgacgggggcaaaggaactgaattttgtaatcttcagcgtgaccggtttcagctcttttgaaagctctctcaagtgtcggacgacgcctgagatctcgtcttcagacacttcaaaaggcgttcttaatgtaaggtggggcggaattaaagcgtaattcgggtcatagcgttttcggtaggaatttgcaatgtcctgaagtttttttgatggaaatagcacaataccgtatttcattttgttccctccttaaacaattgatatggtttagtatatcaaagatgggccgatatacagagagctacagcattttttttaaagcgggggtgatgagcggctgccagtacgtccatttgtgatccccgtcaaaagctttgaaatcgtagtttgtctgctttgattcaagcaactcttttaattgctcatttggacctgtgaaatccaaaatttgatcatcggtcgttttgacggcggtttccttctcgccgatttggtggcaaattgaaataagctgcagggaatcggactgtttcactttatcgagaacatggcggtctacataaggtgactgcataatgacgttcccgaacatattcgggtagtcaagcgccgtcatgagagaaaccgttcctccgagcgaatcccctatcagcgtcctgcctgatccgacttgatatgtcggatactctctgtcggtgaaagggacgagttcatttgccaaaaaacgtttatacgcttcgaattttgacccttccggatggtatgtaagccttctttcctgtacgtttttgtacggaatgccgatgatgatgcttctttcgatttcaccgttcgccaacagttcttcaacctgtctgctgatgcgcccgagccggaaatagtcatgtccatcctgtgcgatgatcacatgatatttgtaaagcggcgagaaggaggacggcaaatagacgagaagctccatttcctcgccgagctcttccgaaaaaagctttttctcctgaatgactcctgttttcatagccaaggtgaattcctccagaaataatgtttgtgaacgtttccattcattgtaacacgaaattctcttgtgaaagaagcgaaaagggctgccgaactgttcggcagccgtgattttttatgatcgttttttttcgtaccaaggcattgtcggtctatcggagggtatccgtatcgctcacggtacctttttctttccgctgtgaaatcccgccggcttttgccgctttcgggattgttggttataatggacgatgcatcgcagcgcatcttcggcacaaggtcttcccagcagcctttcaattttacgaggcggatgatcaaattcatgcttgatgtcgcctgaaggaatgacagcctaagtcaacggcgcactgcaccattttcggtccgatgaaaggtaccgtttgaaaccgggcgggcgctttgatgtatgcggcgcttttcaaagacgaagcgagcgatgtgcaaggaaggacagatcacatatgccgcgtttcttttttttatcagatgcccccttttatagatacaggtcgaacatgttgacgtcatagccgagctgttttaaataattaaacagctgggccctgtgatggaagatgtgggtgagcgtttccgtcagccagcggctttgggtcatcccttcatcgaggtaaaacggctttgttttttttgtcaaaaaatcctcgtcggagagggaagtcatatacgtttgaaaagcgtcgaatcctttctgcatagctgcagccatttggtcagccgactgcaaagcaccatatttcttttcaatccgggcgatgacgtcctcttccttttcctgcatgatggccaagtcggcttctgggatggccgtcagatggcttgccagttctttcaggcttcgcatgcggtcggcgggccggtaagaccagtcagattccttcacttttttcagaagatgacacgtggagcggatgcccgtctccaattcgtggaacaaatcgccgcgcagcgcttgaacttgattcatttgcttcatcctttccatttgcttttattctaaaagtatcacctaatcctgacaggtcttgtcatgattcttaaaaaaagtcagccgtacctcgctaaaatgtcagcagccttccgtttcagatgaagcttgatttccgcgggttctgttacagttacctcagcgccgagattccacaaaagttctccgaaatactcaagttcagacctggggatactggcatcgatcgcccccgttccgtcatcccgcatggtgaggatcttgaataaatccacatcagccgcagcccgcctggctcctctacgtgtcagttccgcttgcagccgcaccggttcagggcactcgctctccgaatgtttgatccagctgagaactgatggatagggaagctggcgggcctgcccgctgtccgctttttccgcacggaggatgcggtcggcgcggaacagtctgaacgcctgccttttaaagcaataggccggacagtaccagaagccgttccagctgtataagccgataggctggatggatctctccgtgcactcgtcagttccgtcataaacgaccgtcaaaacggattgagtgacggctgcgtcaagaagcgtctctaaatgttcggcggcttttgggcgatgcggattccagaacacgattctgtctttcatcgcatcaatccgctcctgtgtttccgggggaaggtggcggtagaacttttttaaaaccatccgcgtttccgcatcaaaggggagcgatccgaaaaactgcaaagattgatacgcgaaaaacatagccgccgcctccgattgtgtgaaaaagagcggcggaagcaccggctcattcagcaaataatagcctccgttcgcgcctgtttcagaatagatcggaacgccgagtgcgctgagctcgtccagatcgcggagaaccgtgcggtaggaaactccgaattccaccgcgagctccccggccgtaaattttcgttttgtatgaatggtcatcatcaattcgattaaacgctctgttttgggcatctgattcctccggttccgtcatttggtttcatcataccatgttcaatataaagaaagatttaaaaatgacccttgaaaaatgtcttgaattaggttaaagtaaagaacaatcagaatattgaagagattcttatcacgagaggtggagggactggccctttgaaacctcagcaaccggtctgcactgacgacgtcagtgcaccaaggtgctaaatccagcaagcggatgcttggaagataagaagaagcgaataatcccccttcttcttatgaagaaggggtttttactttttaaaggatggtgtcatatgactgaacatgtacaaacaacgctggcgcaaatcggcaaccgcagtgacgaaataaccggaaccgtcaatcctcccgtttatttctcttctgcgtacaggcacaaaggaatcggggaatccacaggatttgattacattcgcacaaaaaatccgacaagacagcttgtagaagatgcaatcgcgaaactagaagggggaacgcgcggctttgcgttcagttctggtatggctgccattcagacgatcatggctctgtttcaaagcggggatgagctcatcgtttcatccgatttatacgggggaacataccgcctttttgaaaacgaatggaagaaatacggactgcgctttttatacgatgatttttcagacgaagactgtatcaagtcgaaaatcacggacaatacgaaggcactgtttgtagaaacgccgacaaatccgctcatgcaggaagcagacattcaaaaaattgcgcaaatcgccaaagagaacgacttgctgctcattgtcgacaatacgttttatacaccggttctgcaaaggccgattgagctaggcgctgatcttgtcattcacagcgcgacgaagtatttgggcggtcataacgatcttttggcggggcttgtcgtcgcaaaaggcgaagagctgtctgaggaaatgttccagcaccaaaatgccatcggcgcggttttatcgccgttcgattcgtggctcttaatgagagggttgaagacgctcgctcttaggatgagacagcatcaggaaaacgcgcgggagctcgcggcctttttggaagagcaggaggaaattgccgatgttctttatccgggaaaaggcggcatgctgtcattccgcgttcaaaaagaagaatgggtcaatccgtttctaaaaaatctcaagacgatctgtttcgccgaaagcctcggcggagtcgaaagcttcatcacctacccggcgacacagacccacatggatatcccggaagacatccgaattgcaaacggcgtctgcaacaggcttctgcgcttttcagtcggaatcgagcacgtctccgatttgaagcaggatctcaaagctgcgctggaaaaagtgaaaggggaggcggttccgcatgagtcatgaaaactggacgcttgaaacaaagcttgttcataaccaaaataaaacggacggagcaaccggagccgtcagcgtgccgatccagcacgcatcaacctttcatcaagattcttttgacaaattcggcgaatatgactacagccggtcaggcacaccgacaaggaaggcgcttgaagacacgatagccgagcttgagggagggacgagaggatttgctttttcatccggcatggctgcgatttccaccgcctttctgcttttgtcaaagggcgatcacgtgctcgtcacaaaagatgtgtacggcggcacttaccggatgattacggaagtgctgagccgctttgggattgaacatactttcgtcgatatgacggatttaaatgaaattgctttaaacataaaggaaaacacaaaagtcatctatcttgaaacaccgtcaaatccgacgctcggcattacggatattagaggggtcgtcaagcttgccaaggcgcacggctgtctgacgttccttgacaacacgttcatgaccccggcgttgcagcggccgcttgagctcggcgtcgatattgtgcttcacagcgcgacgaagtttttaagcggacacagcgacgtattatcaggccttgccgtcgtgaaagacaaaaagctcggcgaagaactctataagctgcaaaattcgttcggcgctgttctcggcgtccaagactgctggcttgtgctgagagggctgaagacgctccaagtgcggcttgaaaaagcaagcaggacggctcagcagctcgccgaatttttcgaaaaacatccggccgtcaaacaagtgtattatccagggctgtcttcgcatccgggtgcatcgatccacaaacaccaggcgaacggcgcaggtgcggtcctttcttttgaacttgaggatgcggaagccgtcaaacaggttgtggaaaatgtctctctccctgtcttcgccgtcagtcttggagctgtggagtcgatcctttcttatccggcaaaaatgtcgcacgccgccatgccgaaggaggagcgcacaaaacggggcattaccgacggacttctgcgcttgagcgtcggggtcgaaaatgccgatgatttacaggcggactttgcccaagcgttggaagccgtatccggagcgcttgcccgttcataaaagaaggcgcggattcgtcaaggaatccgcgcctttttttgccatttataacagggtggaaaaccatgtgcccaagaaggtgccgacataattgccgatcagatatccgaacgtcccgaccagcattacgggagcaacgaggccccgccagcctttggcaatcgccatcgccgccgctgtcgtcggtccgccgacagatgcgttgcaagccaagagaatttcatcgagccgaaaacgaaacagctttccgcagaagagcgatacgagcaggttggacatggcaatcacaaagacaaatgccaggaggagcggggcgttcatgaggatgatccgcaaatccgccggaatgccaatcacgacaaagaataagtaaatcaaataagtcccgatctcctgtgagccgcgcagccgttcaaaatagcggggaaacactaccgtcagcaaaattgtcagcgtcgtcagcagcaggaactggtcgcccagaataaaggcaagaaactgaaatccgccgtcagaagaaaaacgttccttgaaaaaagccgctgcttttacagacacagcaacgatcgcaaaggcggttccgatgtttaaagcgatgtcctgcaaggagatgtcttttctcttccaataggcttccgcctgattttcgcggccgcccgccacttcctgaacgccgaagcgtttttgaaaccatgttagcgccggtatccccattaaaatgaaaaaaagaaaagccatcataaaattatccgcaaccaccgtcgatgatacatactcaccgggagttgagaacttggcggccatcgctgcaaaattcacgcctcccccgatataagaggcgctgatcatgccgccgattttatcaaggtgcggaatctgatccttaaacagaaaaaaagcaatgacgcttccggccgcagtgcccagcgcgctgatgcaaaacatcatcaaaagtctgccgctttctttcaggatcttccgcacattgatttgaaaaagcagcaaaggaatcgcaagcggaacaacataggaccacaccgcatcatagaagggcgactcggccggaagaatccctgcattagtaaacagcatcgatccgcccagtgccaatacggcccccgatacagcggcagcccagcgaaaccgctgctctaaataaatactcacagcagcccacaccgcgataaatccccaaagcacccacacgtcatccggtgaaatcaatgaagaattcataaaaaaaccccctgtttccggttagtgttttgaattatctgataattaaatagtgtaaaacggaatgcctaattgatcaatgatcataaaaaaagtcaccatgttgacaaaattgcagaaagagggtattgtacatttgtcagcatgttgactatattcaaaggagagaacaaatggatatcaacggcttaatcaacgaattacatttgatgcagcaaagctatgcgacattgttttcggttgtcaataaggtgcaaacccgcggtgacgaatatatggaaatattaactgccaggcaacacatggcgctcatcgctatcgcgcatttgccgcctgaaactgccacgcttacgaatatctccaaaaagcttggcacaaccaaacagaccgccaacaagctgatgactggtctggtcaaaaaaggctatgtcaaatcagtgccaagccaaaaagacaaacgctccattaatattgaaatgaccgctgaaggaaagaaagcgctggtggagtgttccgaaaggtccgtctatttcctggccgacttgtttcagcaatttacatccgaagaggttgcgacattttggcggctgttgcaaaagctttaccgttttgacggtgaggaacatgacggttttgaggagaatgcaaacattcagcttggcgtggggaattcgttagatacagaaaggattctcggagaatttgagaaacgccgctatggaggagaaaacgatgaaaagtgatctttatgtaaaagcaacaacttttaaaatcaaggcaaagaagaagttctatcatgcaaaagataaattccgccagacaaaggaaaccattcgccgcggcacaaaattagacaggacaggcccctttttctcaagctgcattgctctgatcattattggatgttcctgggggacaaacgcagaatggctcgtctggttaggggccgcaagtcttttaagcaacgttttattgctgtttgcaacattttttcgccgtaatcaaaagtcaatttgacattcattgtgcgtctaatggatcgtatcgtagatcaatcaatgacttgcgacaaggatgttcagaaacttattgaattgtagaatagtgatttcaaagacaagaagccagtcttgtctttttttagttgaaacctcatatttccatatgcgtataaagaaagggaggtggaaaagtgaaacagaacaaaagagaacaacttgttaacctgtttagtgtgttaaaagaaaaaggtcagatcaacgcggcagtgctagtcgctgaagacggagacattctttatcaaggcgccttcggatatgaaaacttggcagataagcgtttattgcaggaacattccttatttgaattagcatcgctatccaagccgttcactgctttgggcatccttcaattagcccagcaaggggaattgaaaatcgaggatcccgtagaacggtggataaccgggtttccctaccagggcgtaacgattcgcgatttattgacacatacgtcgggtctgcccgattatatggagtggtttctacaacattgggatcataacaagattgctgttaatcaagatatcgttgatatgctgatgaatcatcatccgcaacgctattttgccccgggtgaaggttggctttacagcaatacgggatatgtgctgcttgcggttatcattgaaaaggcatcaggtctgagttttgcagaatatatgaaaaaaaacatctttgaaccggtgaaaatgcggaactcaagggtttataacagaaggctgcagcctgaaaccattgagaactatgcgtatggatatgtgtatgacgtgcatacagcacagtacgttctgcctgatgaccttgaagaaacaaaatatgtctgctatcttgacgggattcagggggacggaaccgtaaactcaaccattcatgacttatatttgtttgatcaagccttatatacagattgtttgatcaatcaagtctcaaaagagcttgctttttctcccgcgtctctgaaaaacggagtgtctatagattacgggtgtggatgggtgcttcgggacagtcctgaaacagggagaattgtcggtcacagcggcggctggccaggctattcaaccgtaatgatccgatatatcgatcaacgaaaaaccttcatttatttgagcaatgtggaacaggatgatgaatatgaacaggccatctttgaagccgttgaaaatatcctgtttgacaaggcctacaaaatccctgatcgccctgccgataaagagaaaaaagagatcgatccggccatttacaaaagatatgccggaagttattcacttcaggatggcaccgccgctgatgtgacagttgataagggccggatttatatgcaaatcaccggacagatccgttttgaattatttccagcctcggaaacgcgctttttcctcaggtcattgtctgttgaagtggaatttattttggaggatggtgtcgcaacccgcttgattatatatcaaaatggcgcagaggaagaagcggtgcggatagtggaatcaaacagcaagctatgaccgttttgattgagagtttggcggcctgctcttttgtctgtcaggaggaaatttatcgttggaaggttgactatgcaatttggggatatctgcccggctgaatttcctgatgagcatcaatcggatattcatggtaaaggtgctccatctataaggaggttaatgaggctgaacaaatttaacctgttgaaagagccctgggtgatgaatatagtggcatgatcattttgggataaagcgtttatatggaactgctaaagcaacagaaaaaaccaagcagaaaacatctgctcggtttaataactaatacttcggccaacctttagaatcccagtttaaatcattgatcagcagcttaggcgccccgttgtcaagcgcatcatacccatgtctgacgatgatgttgccgttcacgatatccgcgccgcccgggcccttccactggtcgtttccggagtcgaggattgtgcctccgccttccgtcattcttgccgcttttgtcatagtaaggccccgtgattttgtcgagcggccgtaagcgatcttatacgtgctgttcacaccttggcagcatttatcgaacgaaacgaataaataatagtagccgtttttatatgtgatagacggcgcttcaaccgctcctccgttgttcggccttgatgcgatggaataaaccttccctgtaggtttcatcgtttttttatcaagctttgtcagcttgatgccgctccaaaacgagccgaaggacagccacggatttccttctttatcaatcactaactcagggtcgattgcattataattgttagaggtcgtcgtccggatgacaagcccgtcgtcgcgccaatttccggatgagattcggtctgttgaagccagtccgatcgccgaagtattggagccgaacgcggataccgcataataaagccaatagcgtccattataatagctgatatcaggcgcccattggttttcttcatggttcggcacgtactttttccaccatgataatggagttgcaaatatgcttggcgctgcgctccatgtttttccgtctgtcgatttgatgacgcggattccattgccgatacccgtgccgaatgtataccacgtatttccttctttaatcatggaaggatcatgaataatgttgtctccttttgtatcccaaaaagccgctgatgttggttcagccgacgagaaaataagcagaaaaaataaaataaaaccagaaatgatagtcttagccacagttgttctcctttcaaatttcgatgtctttaacattcggccctcccttttgtgaaatatttcccaacaagacgaactttattttagcagggattggctgtctctcaatcagccaaaggacttgttttctagtcctaaaataaaacgaaaaaaccagaaaatatccatattaaaaaaacaatcacctaaaagtcatttcatcgtctgaatgtaaaagggatgatgtaattattttggcttatattggaacattttaggttaggtgaattatcaaaaactttgagatgttcgtggagaaaataaaaagcgttggaagaagaagcacggtctcccctcgaatattttcattagccccggaaggtgaatgactcttttagttgatttagtggggtgaaattgataatatgaatttgaagatagactgtcaaaataatgcatcacaaaagaccacaggcgcgtcatctacgtacggtttattaaacgttcaggtgtattatttctataagaaatgcataaaataaaaaagacccgactgcgccaacagtcgagtcgagtgtacaaagcggcccaacaagggcttggctcagccattttaaaatagactttccctatgaactttaccagggctcaagggaagtctatttttctttcttcgacaacacggcaattaacatgccaaaagcaatcattaacgagattgtttcgaatgtcgtcgtaagcatcaccccctttcataggggatgagccagcttcccttgagtgagccgaaactttgtacaaagaatattttaccatacctctttcaaacactgaggctgttttttgatgttgaggcgggatagaggagaattaaataaaacgaaacacaaaaacggcaggaattccattggaaatcctgccgtttcgatttggtatgattccgactgggctcgaaccagcgacctctaccctgtcaaggtagcgctctcccagctgagctacggaatcatgatatgtaacactgggtatttgtttcgctgacaagttctattatatgcagattaggtggattcgtcaacagtttttttgattttttttgagaactgggaaagagtcttgcagtacgccgcgcgttatgaaaatattgtcttatatagaaatcaaaagggagcaggaattggatggatctgatacttaaaagtgttgatagtattttaatcgtatttttagcaatcttttttatgtggaaattcgtttatgaaattaaacatgagaagcggaaggctgttatcttgcttttgctgctcatcaatgtctattttattgtaaaagtgttcaatctcgtgttgcaattgatgtagcgaatataaaatgcagtcaaggagaccgaaatcaatgaaaacagaaaagcaaaaaatgctggacggagagctttatcatgcttctgatccggtgctgtgccatgacagactcaaggcgcgcaaaatgacgaatgaattcaaccattcgaacgaaatcgacgacaataaaaggaccaagctaatcaaagagctgtttggatcaacaggggaaacgatcctcatcgaaccgtcgtttcgctgtgattacggctttaacatacatgtcggggaaaatttcttcgccaattttgactgtgttttccttgatgtatgcgaaatccggataggcgacaattgtatgctcggaccgggcgtccatatttatacggcgtcccatccgctcgatccgtccgaaagaataagcggtgcggagtatggaatacctgtcaacatcggccggaacgtctggataggcggcagcgcggtcatcaatcccggcgtcaaggtcggcgacaatgcagtgatagcttccggagccgtcgtcacaaaagatgtcccggataatgccatcgtcggcgggaatccggcgaaaatcattaaatacgttgatagcaaaaacaccaattctatgtaattggtgtttttattttgccatagacgcggtgaatgtcggggctgataaaatatccgcgggaagcagtttcctcccgcggatttaagtgctgctatcgggtgaccgtaatattgttgatgacaagctgtcccaatgaattgagatacgaaaatgtcgctttgcctgggcttacggcctttacgtatacgcggtccgaagtgattctgacggtaatggcgctgccgctgtaggagacgttcgaaatgccgacgtattgatcctcctgtccgactctcatcggcctgttgatgacgatcgcctgaggggcgatgattccttgtgcaaatgcgtgagaagagagattttcagtcttcgagagctcctgggcctgtacatgcatgggacttcccgaaacagcaaggatacccgccagtaatgatgaagcaactaaacttttacctaaccacttcataaccatcatctcttttcctatgtgatggttccaggatatgggattgttgggcggcagtcaattggctccaatgatgattcacacattggacatacgaaaaaaaacattttgtgaagcggcaggaaaaacgactcattatttcgaagatgttcttttgttcaaagcgttaataaaggttttcacatttttcttgtcctgcatgacaggtgaatatatataggaaagcgtcctgttaaaggtttgatttttcagccggataacggaaaggtttccgtgctgtacatctctttcaatgacgcttccagacaggagagacagtccgatgcccgtcatgagcgtttctttgattccctggttgctgctgatcgtcagaaacgacttcacttttaaaccgtttgaacggatgacatggtttaagtattcgcgtgtgcctgagccgacttcgcgcgttacccacgtttgattttgcagatcggagattgtcacgtcctgtttggccgcaagcggatgatcgcttgaagcagcgatgaataattcgtcctgcataaaggcgtgtacagaaagctctttttcatttgtctgtccttcgatcaagccgatgtccactttgtacaggcggacggactgcacgatttcttccgtgtttccaatgacggccttgagctcgagttcaggatattccttttgaaggtcgaagaggagcgaaggcaaaatatattcgccgattgtgaagcttgcgccgattttcagctcgcctttgatcgagttgtggtgatcgagaatgtcctgcctcgtttgttcatagatggtgatcatttgtttggcgcggtcgtataaaatttcaccggtcggcgtgatttttaaatatttcggagagcgttcaaataatttcgtctggaattctttttcaagatttttaatgtgcatgcttacgctcggctgcgacatgagaagaagctcggccgttttcgtgaaatttttgacttctgcaagggtaacgaatgtcttcagcgcatcataatgcacacgaatctctcctttattaaaaatcttaatagctgtgataattaatatatattttactaatgttgagtattccagtaaacttttaattagaatctttttttaggaatatttggtttgaagcaggatgacgccgcgcggcaaaggggacgtgatgagtgagcgcttacaatgtttcttagcagcaaaagccgtgatcgacagatgctttgcgtcaataaaaccgatttgatttataggaatagtggatatatgatgagtattatccttttccgtttcaaaacaagtcatgatttttttattccttagtgaggtggatatcgttgcaacttcaggtaatgaacagtccttttaatcaggagcaggcagagctcctcaaccgtcttctgccaactttgacggcatcacaaaaagcctggctgagcggttatctggcagctgtgcaaaccgccgatgccgcggcggctcttgaaacattgccggcggaagctcctgctgcaagcccggctcagcctgtttccaaagaagtgaccattttattcggatcgcagacaggaaatgcacagggacttgccgaaaacgcggctaagacgcttacagaacggggatttcaagtcaccgtctcttcaatgagcgattttaagccgaaccaattgaagaaactaaaaaaccttctcatcgttgtcagcacgcacggtgaaggggatccgccggacaacgcgctgtcattccatgagtttctccatggaagacgggctccgaagctcgatgatctccgttattctgtgctggctcttggcgacacgtcgtatgaatttttctgccagaccggaaaagagttcgaccagcggcttggtgagcttggaggcacaaggctccatccgcgcgtcgactgcgatctcgattatgatgagccggctgcagcatggcttgacggtgtcatctcaagcttaaacgaaggacaggaacagggcgcaagcgccgcacctgctcaaacggcagctccgcaagccgcgggaggagtaacagtatattcgagaaaaaatccgttcagagcggaagtgctggaaaatttgaatttaaacggccgcggatcaaataaagaaacgcgccatcttgaattatcgcttgaaggctcaggtttgacttatgaacctggcgacgcgctcggcatctttccggaaaatgaccctgaactcgtcgatatgctgctgaaagagctgaaatgggatccgaatgctgccgttgctgttgatcaaggggaaaacctttctttgaaagaagcgttgacttcttactatgaaattacggtgctgacaaagaaattcattcagcaggcggcagaaatcattgaaaatgaaaagctgcgcgagcttgccgctccggaaaatgcggatcaattaaaagcgtatatcgctggccgcgacctgattgattttgtgcgagatttcggtccgatcgcagcagctccgcaggaatttgtatcgattcttcgaaaaatcccgcctcggctttattcgatcgcatcgagcttcgctgcaaatccggatgaagtgcatttgacgatcggtgctgtccgctacaatgcgcacggcagagaccgaaaaggggtctgctcggtattatgtgccgaacgtctgcagcctggcgacaccctgcctgttttcattcagccgaataaaaactttaagctgccggagaatccggagactccgattatcatggtcggtcccggcacaggcgttgcgccgtttaggtcatttatgcaggagcgcgaagaaaccggagcatcggggaaatcgtggatgttcttcggcgatcagcattttgtcactgatttcttatatcagacagaatggcaaaagtggctgagtgaaggcgtgctgacaaaaatggatgtcgcgttctcgcgggatacggaagaaaaagtatatgtacagcatcgcatgctggagcacagcaaagaattgtttgagtggcttgaagagggagcggctttctacgtttgcggcgacaagaacaacatggccaaagatgttcaaaacgcattgcttgaaattatcgaaaaagaaggcggcaaaagccgtgaggaagctgaagcctacctcgcagaaatgaaaaagcaaaaacgttatcagcgcgatgtatactgattttgattgaaaggggactttttcaacatggggaacgaaatattaaaagcgcctgaaggcccgccgagcgatgtagaacgtattaagaaagaaagcgattatttgcgcggcaccctgaaggaatcgatgctcgagccgctttcagccgggatttcagatgacgacaaccgtctgatgaagcaccacggcagctatttgcaggatgaccgcgatctccgcaatgagcggcaaaagcagaagcttgagcctgcgtatcagttcatgctgcgcgtccggatgccgggcggtgtggcgacgcctgagcagtggcttgtcatggatgagcttgcccggaaatacggaaacggaacattgaagctgacaactcgggaaacattccaaatgcacggcattttaaaatggaacatgaaaaaaacgattcagtcgatccattcagccatgctggataccattgcagcatgcggcgatgttaaccggaacgtcatgtgcacttccaatccgtatcagtcagaaatccatcgagaagtgtatgaatggtcgaaaaaactgagtgatgacctgctgccgcgcacacgtgcgtatcatgaaatctggcttgatgaggaaaaagtggccggcacgcctgatgcggatgaagtcgaaccgatgtacggaccgctgtatctgccgcggaaattcaaaatcggcatcgccgttccgccgtcaaatgatatcgatgtattttctcaggatcttggttttatcgcgattgtggaggatgacaagctcatcggcttcaacgtcgcgatcggcggcggcatgggcatgacccacggggacaaagcaacgtatccgcagcttgccaaagtcataggcttctgcaagcctgaacagctatacgatgtcgctgaaaaaacgattacgatccagcgggactacggaaaccgttcggtccgcaaaaatgcccgcttcaagtatacggttgaccgcctcggcttggaaacggtcaaaaacgagctggaaaaccgtctcggctggagcctcgctgaagcaaagccttatcatttcgagcataacggcgaccgctacggctgggtaaagggcgtaaaaggaagatggcactttacaatgtttgttgagggcggccgtgtcactgattatgatgattacaagctgatgaccggcttaagggaaatcgccaaagttcataccggcgatatccgcctcacagccaaccaaaacttgatcattgccaatgtcacaagccaaaaaaagaaaaagatcagcgagctgatcgaacagtttggcttgactgacggcaagcattatacagcgctccgccgcagctcgatcgcatgcgtcgcactgccgacgtgcgggttggcgatggccgaagcggaacggtatttgccgaagctgattgacaaaattgatgaaattgttgaagaaaacggcttgaagaatgaagaaatcaccatccgcatgacagggtgcccgaacggctgcgcccgccatgcgctcggcgaaatcggcttcatcggaaaagccccgggcaagtacaatatgtatctcggcgccgcttttgacggcagccgtctgagcaaaatgtaccgggaaaacatcggcgaagaagaaattttaaaagaacttcgcaatattcttccgcgctatgcgaaagaacgcaatgaaggagaacgtttcggagatttcgtcatccgcgccggaattgttaaagaaacgacggacggaacgaattttcatgactgatgagcattttaaaaaaacgcctcagcccattgattggtgctgaggcgtttttcttttttacgaaaatgcccggacagtttccgactctatgatcattttcataaactctgcagccgcaggtgttgcttcttcaaatgagggtgttatcatgccgacttcgcggataatttgaggagagatgtcttttttgatcaaccgatgggacacggaggaaagcgagaagcttgatatcaagccgattcccaaattgttatgaaccatattgaccaatgtttccgcgttttgcacagtcaggttttcttttaactcgaggcggtgtttttgaaagatttgagataccgcgatttcgtgcccgcctttacaaaaaatcaattcattttgatattttttcagatcaatgaacggtgcgtcttttaagtggtgatattgctcaggaatcacggccgtcatccggtcttgaaacaatacttggctttcgaatccgtcaaagggagaggcgacgattcctaaatcaaccatgcgagtttcgacccattgcttaatttggtcggaggttccctcaagcagttcgatttgtacgagcggatactttgatctgaaggaggcgatagcctgcggcaaaatatttgctgagacggcggggaaggagccaaccttgactttccctctgagcagatgattttcttgatcggccacttggtatattttgttttcaatcacgatcatctgtctcgccagtacgacgatttcctttcccgcgtccgtaagttttatcttgttttgtttatcccgaatcaataatttgaccccgagcgacgtttccaagctttttacggctttgctcacggccggctgtgaaatatacagttcgttggctgcttctgtcatattcaaagtctctgcgactttcacaaagatgtgaagactgttcatgtttataaccaaatggttatacccccgatgataaaaatgtatttcagttatatctcaatatagcatatgctgaacatgaaacaaagaagaaaggtgacggattatgtttaaagtacttttggggatcatctctgtaacgctgatttgggggtatacctgggtgacgatgaaaatcgcaatcactgacattccccctgttttattttcggccctgcggctgttcattggagctgttcctttgtttgtgattctcttgatcaaaggaaggaaacgttcaataggaaaggagaatatcaagcattatctggtgatgagtttattgatgggtttaggttatatgggggtgttaacttacggcatgcagtttgtcgattcgggaaaaacgtctgttttggtgtacaccatgcctatttttgttactgtcatcagtcattttaaattaaacgagaaaatcaatgtgtataaaatgctcggtttattttctggtctgatcggtcttttgtttatattagggggcgggattctgcatgttgatcaaaacgtcatatttggagagctttgcgttttaatcgcagcgctcagctggggcgtcgccaatgtttacagcaaactgaaattcaaaaatacagatatgattcatatgaatgcatggcagcttctcacaggagcggtgatgttattgattttctcttttatactggaaccgtcccggccgattcactggtcaaatgaagcaatcttgtctctattgtttaacggtttattctctacggctttgacgttcgtcatttggttttggatactgaatcaaatcgaagcgtcgaaagcatcgatggctttaatgtttgttcccgtattaggccttttgttcggctggctgcagctgcatgaaccggtcacattcagcatcctgatcggcgcattcatgatctgcatcggcatttttatgaatacttatcaatttaaaaaagtagtaaaaaaaggcagaggatctatatggtaatatgaaatgggagggagatttatgaaaatcgaacacatcgccatatggacgaacaatttagaggaaatgaaagatttctatacccgtttttttcacggaaagacgaatgaaaaatatgtcaatccgaaaaagcatttcgaatcatatttcatccagtttgaatcgggaacacggcttgagctgatgagacgccccgaccttgcaaaaggagaggagaacgcttccggctatgcacatatggcgttttccttagggtcgcggcaagaggttgacgagatgacgagccgctttgaaaaggaaggataccaggttgccggaaagccgcgcgtcacgggagacgggtattatgaaagcgtcattctggatcctgacggcaacatcgttgaactgaccgtttgacggaaaaaagctaatgtccgtttttagacattagctttttcgtttagatggcagcatcgagctgattgattttccatttgttgttttctttcacaaacgtgatctttcttttcgcagtcaccgatccatccaatgccggtacggaaaattcataagtgcgggtattgtttttttgagagatcagtttgatttttgccttgtcccatcctaagaggttgtccccatcgccgacaggcacggccatttttcctttataagaaatgatgttgtatttttccaagccttttttaatggcgtcttttgtgaaaaccggcgtcaagtagtctgttaattttgcttttgtgctgaattcactgcacatatacgtatatggaagaccgcggtattcaaatgttttggatgggcaagttgagtttttcgcttttggattgtggccgctcatcgtattccaaaagtgctcccgtgcctgcaaggttaattgcatgacttgcttaattgttaaattccctgatgtttgatttttcgctgcgagggacgctccggcaggcaagatcagtaaaacagctaataaacaaacgattaactttttcaatggtcctctctccttaaatatatctcttatattacaaatgttacaataattacagatagattacaagaggtttgcgagaaaaattttcctccgctgttttcttatatatgacgacataaaagcagccggggttatggtttgtccaggaaaatattttatgtccattgattcgtttcccggatttctctcctcataaacatagaagcctcatgttgaaaaagtattttatattgaaaaagaattctatctgggacctcgccgggagcaggaaagaggatcactgaaacatcaatgaattatattgttgaaaatcagaattttatataaaatcaaactttatcagtaaaaaaactgtaacgaaattcgcatcaatctgtcatagcggtgacattttgctgtgttacgattttccctgttagtttcagaagggctaacaagggaggatttaacttatgaagaagacaatcatgtccttggctgcagccgcggctatgtcggcgactgcattcggagcgactgcctcagcaaaagaaatcgaagttcaaaaaggagacacgctctgggggatttctcaaaactacggaatgaacctcaaggacttaaaaaaatggaatcagctttcatcagatctgatttttccaggtcaaaagctgaacatttcttctcaagaagaaaaatctgaagaaaagcagtacaccgttcagccaggggacacgctctcaaaaatcgcaaaagagttcggtgtgactgtaagcgatcttcaaaaacggaacaacctgaagtcagacttgattattgcagggcaaacgattgcaataaacggagaagcggcagctgcagcagcgcctgtgaaacaagagtccgctccaaaacaaaatgatcagcctgtcaacgtacaaaaggaaatcacagtgaccgcaactgcgtatacggcaaatgacgggggcatttcaggcatcacaaaaacgggagtcgacctgaatgcgaaccgcaatgcgaaagtcatcgcggttgatccaagcgtgattccgctcggcacgaaagtatatgtggaaggctatggcgaagcgacggctgaagacaccggcggcgccattaaaggccataaaatagacgtatttattccagataaaaaagacgctttcaattggggcgtcaaaaccgtaaaggttaaaattttaaactgatataaaaaatgcaggaggcgttaattgcctcctgcatttttttgtcgaacgatgtttatgctgcatgctgttccgcgcgtctgctttttacaaaaaccgaaatcgcaagagcggcggctgcaaaggcgatggctacgaaataaaccatatgaacgccttctgtcatgccttgcatgtgcagctcctgacggctgcctccggaagagtgcgcgataaagcgattcgaaacggttgtcaggatcgtcgtatacaatgccggaccgattgcccctgaaacttgattaactgtattcattatcgccgaaccatgcgggtaaagcggtttgggcacctgattcaaaccgagcgtcataatcggagccattgtcaacccgacgccgagtgtaaagccggcgtagagcatcattccgaccgccatcggcgtatcgcttgaaatattcgtaaacagcgaaaggacggcaatcacaatgatcaatccggtgatcaacagcggtttaaagccaagcttatcaaacaggcgccctgcaacaagggatgtcatcgcgaggacgaggccgcccggcagcatgagaatgcctgtataaagcggtgacagctcaagcgccatttggaagtaaagcggcaaaatcagcatcatcgaaaactgcagcatcatcacgatccacatcaggataaccgagattgaaaatatctttgaacgaaacggcctcatatcaagcatcggcacttccaatctgagctggcgcatgacgaacaatattaatccgatgacaccggccgccagtccgatgatgactttcggactgctccagcccgctgcttccccggcgttgctgaagccgaaaacgatcccgccaaatccgacggtcgataaaagaattgataatatgtcaattttcggatacgtcagttcggttacatttttcaagcggaacgccgcataaaaaatcatgaagaccgatactggcagcatcatgaagaaaacaacgcgccatgaataatgttcgacaatatagcctgagatgaccggaccgatcgccggagcaaataagataacgagcgtaaggatcccggtcatcgttccgcgtttttgcggcggaatcaaagtcagtatcacattcatcacaagcggcaatatcaggcctgtacctgaaccctggatgatccgtccggcgagaacgagcgggaagaccggagcaattccggccagcaaggttcccgctgtaaaaagcgtcatcgcagacagaaacagctgccttgtcgtaaagcgctgcattaaaaacgcggtaatcggcacggcgatgccgatcatgagcatatatccggttgacagccactgggctgtgttcgctgaaatgccaaaatcgtcgatgattttcggcaaagccacattcatgaccgtctcattaatcagagcgagaaaatttccgacgattaagattgcgataatcatgaaggagccttttctagcttgttccatttgtattcccaccctttatgaacgttttagcaaaaaaggaatttgttcggcggctgcactgagaggccggccgttttttttcgtcactgagagcacatacgcaccctcaatcatcgcttgtatcgcgacgctcagcgtctcggccgtttccggcgcatagcctgactggagtagtttttcctgatagacaagctgccagtcttgataaacctgttcacacgtttggcggagcctttcactgaacgaccacgtttctgcggcgacggatacgatcggaatatcgtcgttttcttcgatgatgtattcctcgattccgtcagccatcatctggatataagattgaaacgccttgacaggatcagcttcaccgctgatcgctgacgatatatacgctttgattctttctccggttaattgaatcgcctcttgcgccagttcctctttgccgccggggaaataataataaagcgatccccgcggcgctccgctttcggctgtgatttggcttaagcctgtggcatggtagccttgtttgcggaacaatcgtgaagccgtccgcaaaattttgtcgcggctgctcattttttctgccattctatcattcccttatgattttatactgatcggtctatataattttaacgaaaaaaaagaccttttttgaaggcctgttttaaaataaggacgatttgtccatattcggttcagcgggaatccgctgaaggcttcagaaagccggcaagcagcaggcgccacagcaatcgctgccaatatcgacaaaaggctgtcagatatgaagtgaacaaaagcggaattgatggtatagagtgcgagcgccgttaaataaacggctaaaaaaacatagccgaacatttttctgccggaacggtcttttgagttgaatcaaaagaaacaatccggccattaaaatgataaacgtcacagttattctcccttcgcaggaaagtttctcaatcctcgtatgtccggtttctttctttgttgtcttcaaatgccagatgaatgacgaataaaaacagacaggcgatgatttcgacatccagcgggatggtgatgctgtccatcaattcatcagcgagatggatggcaagccaagtaaaaaaacattcgatcataaaggtcgcagctttatgcccaatcataaagctcagaattttttccgggatttcaaacagcgcgccgaggccaaaagataaaaggatataccagaagagcgaccagggcgattcgtatgtaacgccgaaaatcgcaaaaaaaccggcgacgccgaaataataagacccgaaaaagagcgtaaacacagtgaggatcaaaagaaagatcatagtcactgcgaacatggtaccgagagtttttttaatcattaatcattcattcctaatcatgcagtgtatattcatgatatcagaaaaatatccggttgtgagttataaatgagattttggggttaaagtttgtgtggatgggggagtgaagagagcgttctgaaaaattcctaaggtgtttttcgagacctaattaatcaccatatatcatatttggagcgttttcataagggctgcaatcaagaggataggatcccaaataaaaaaggctgccaaccggcaaccttactttgttaagcatatttcgtatttgcttgttcttaaaccgacgtgtttacccgaagaatcattttcgtgccttaggtgattttcgattttggttcaattgcttttttgaatctcatttgtattgtctattcattttcatcttgattagattcaaggtattgctctaaaaattccttatcatcttcatcttctggccagagtcctaaatatttgtgttcccatacaattcttctttcataatcatcagcatctgataaatcctcatagtcgtagtcgatattaaattcaccatcactgtgaatgatcatagagagactcgtccaagtctcttgatcactattcttaaattcgtaccatagcttttctaagttattgattaattgtctccaaagatttcgataggcttctttttcaatcctaaaaaattcagggatattatgacaatataccggtgaatcatttccttcaggataataataaaagaatcctttttgcacatcttcaagaatttctccataaatcaaaatctttgaccattcctctggaatagtctcaactactgtctccgcaatttcttgatatatcgtgtttaattgattttcatccattggctacttacctccaggcttattatcaaatttcacaacttcccattcccgttttccgattttatattctatctcaaagcttgccggtctttgggaattccctttgtatactggctgtattttaacctcaactgttcttcctttttcgaggtgtttggcccacatgttctcaagctttttccattctcctttatttaagttaccatccatcggcacaaggttgtcaagctttccagacccttcgaatatacttgcaatgagatgaccgccctcatcggtttttaatcgatcttcacggccggcaattctttgggcgtatttgtttctctttgctgctcccaaatttagtttgccgctgacatttgtaatacgtcctttatgatcagttttataagtatagcctacaggcgttgtatactcaatgttcggttttaacacctttcttcttttgactcttgtgaaatggtcaccatatttcactttatggatggtttttgagtctactttaatgtctgtttttgttttggaagaaacacccgcaatgatgctgaccattcgatttcttgcttgttttgcttgatcagaaatctttttggtttgttgaattaatttatctttcaatcgagatccatctatcgtattgaacggaactttaccagcattggctaaagctagttgaggagaagcgatttggactttcggaatgagatttttaatatctttaaaatccctgacaactttatcagctgctttcttacctgcctttttcgcactctctatgcccttgctagctgtctttttagagacatcctttatcttagatgcggcttttcccatcttgcccgccttagccaacttgctaactttgtctgcacctttcgttccgacaatggatgacgcaaccattccggtagcgtatgtaaaccatctcgccctgctttctgcatcaccattgatgacgtccctcacgaaggagtcctcgatatctttctttatgatttcaaatgtttctacagggtgggtgactgtgtaggcaatgccctctagcgtttcttttggattggttatggtatctcgtattcctgtcactgtatcgacggccacatcttctattccttcttcaatgccctgcttaatacgccccatgataccactttgttttcgttttcgatttatagtgtaaaaatagtaattttgctgcttttctgtcagattttcaattccaatctcttgtgcaatctcaacaaattcatcaggatcaatgacattttcgagcttttcctttaggtgagagattttattaacctgtttgttagcttcactaacttccttttcgagttttgatctcttatcgagcttagccaacataacgcccatcgctgtttcctggtttccactcaaggtatccattttatcctgttttaaaatagaacctttctgatagccggtgatttcaattttagggcctgtgtacattttttcaagcctagccatgtatctttgcattgtttctaagtcgttttcagcggctttgatggtgttcgtctgctccctgtcgaatgtatgtaatttttcaattgtctgattgatttcttttaaagctttcgagtaattctcgtgaaaattactgtcatctaattccggcaaatcgactatatggctgactttagcgattgtagcattcgttttagaaaccaaacgcttcgtggtgcgatcggcatctttcactccttgttccagctcattatcgaggaaggcttgcgaaatatatccattgtgttgtggctccagggaattcaatgcacttttgattttcttcaatgctgattgatttcctcgataaaagtttcaaaaaattgaaggaatggggtgtgacactctttataaaaattccgtattgcgtcgccgccttttccttttaaggcatcgttgagcgacgtgataccttccacgctttttttaatgttgacgatttcttccgattgttgctttaattgttccaccgtttgatcaatcgctttgtgcagcgcctgaacgtccagagtcttcatggcattctcctctaatactaaagttgcaatcattttagagtttaccactttacggaagggtattggtgaatacatcctgtatacccaataaaatgaacctttcgatttaggtttatatacctactagagatttcattatcctgaagccaaaatatttacaaccacagcgactcccggtacactacataaaaacaggacaggcaggtgcaaaaatcgaaagatgaagcgggctttaactgaccaatacggcagctttacagagatggcagaaaacgaaatagaagggaccgattattcggtggctgctcgggatgcagggagcgctctgcttgtgatggctccccacgggggcgggatcgagccgggcatcagtgaaattgtcaaggcttttgcagagggcgcttcggtttatttattggaaggattgaaaaggcgcggcaataagagccttcatgtgacaagcgctcattttgactgcccgcttgccttgcgaatggctgcaggacaccggtacatactggcttttcacgggtatgaggagcctgctcatcgacatacgctcatcggagggacagatcgaaggcgcgccttgatgtttaaggagacattggagaggcacggattttctgcggagctggcggctgaaaggggctatctttcaggtacaaaccctgcaagcatcaacaatcgctgccaaaccggtttaagcgtgcaatttgaaatcagcacagcccagcggaaggcgatgtttgagcaattcacattaaagggcaggcgaacgtctcaaaatgaggtgttttcccgctatgtcaaagctttgaaggaaggagcatgcatcgcatatgggccgagtgcagccggcagctgagccggctgtttttttattttctcagcatataagccggccggctttccgcagcgaccattttgccgaggccgtttaccgctgcgtacgtgcggcgggtttcccgccggtagcgtgcaagttcgtctacttcttcaaggcgtggagcattcgccgattcgctctcttgggaaaggcttgccatccacgcctcatgaaactggattccggcctgccgtttttcaaagagctcgatccgtttgacagcgaacgactccgtgactttaaagaggtcggcgatcattttagcggcttggcatcgcagctgaggaaaatccatttttaaaagcataaaagtagggacgcaaaaatggtacataaattgattggcctggaactcctgcagctccctgaacatctgattcatgtaaagctggtttcccgcgtgctttaatacgtggcacagctcatgggcaaagtcctcccactgcttttcctttgaaaggctgctgttgagaataatgctgtacatgccgtcatgcttaatcatcatgctgttgacattttcatagtgaatccaaatattaaaatgagcggctatgcgattcatatcaatctggtgaggttcaaaaaaaccgaacttttggtacatatttttgacgtattcttctaggtgagataaataaaacttcaatacgagacacccttttcgaacgaatgttctgtttttagcgggaaagaaaagcccgtcaaaggggctgtcatgatttcatgcagatctatcatatacgatgagcagccactttagcaaatctttcccttttttattgtcttatctattaaatcggcgctcaccaggtaatgtttaataaaaattccttatttatccgttttgtttatctccgggctttcgtttcttctctttttcttttaagtattgaatgaactcgatggcctgctgtctgctttcgggggaaaattcctgcatgtcgcggtaggcaatttgcagatccggatctgcgatttcgtcttcgatgttttttttcttttccgtgcctgtcagcagatagtctatcgtcactttatagtaatcagcgagtttttttaatgtttcatagtccggctcgcttcttccgttttcataatgggagtagcgtgcccgcgatacaccgatctgctttgccacttcttcctgtgtcctttttcctctcaggctcttcagtctgccgcctaacatagaatgacctctcttcctcaattcggcatgattatctctattatagatacaaaatgtatcaaaataaacagatgataaaaaaagtatcaaaaaagtgttgatgataagaagcgtatcatatataatcaaatcatcagatacgtattgtatcaaaaacagggagtgagaacatgtgcgaaaacgattgatcgaagagcgctctaagaggggatggacccagaagcaagtgtcggaaagacttggactctccgaggtttatgttcgcaaaattgaaaggggaacacgcaatcccggcagagaaacgatgctgaaattcgaaacgctttattcagtgcctgatcgtttgctgtttcccgatctttttcaggtctttatagatacatattgtatcaaagaaaacctgcataaaagaaggcgatgtcatgaatcttgaacatccgatggtcacacgcatccgaacacacggctatccaaaggaagccgacagagagcaaatgagaagccacggcggacttgccggatatccaaaaggaggaagcatgggtaaaattgtgatttcctacagctcagaccggtttgatcaatggcggctcggagaagccgggggattcatcgcttttacgaaagacggaaagcctgtattccaatttgatcataaaggccaatacgaacggtatctcaggctgaaccgcaaaaggcagaaggaagggggaagatgaatgtcccgcccgccggatcaaagctatcccttttcggtttactcagggcttttaacacctgttcactacgagaaaataggcaatgccatttggctttttttatggtgcatcagttcaacaacaaaggaaatcgaacgcgatggggagacatggggcatcgtgctcggcaacaagccgctgaaagcagccgaactggctcttcaattcggcgtcaacgaaaaaacgatcagaagatggctcgctcttctcgaacgaaacggctacattgcagtcacaagagcgccttacggaatgattttgtcagtcagacattcaaaaaaatttgcctacgccagccatgtccgaacagaactgcctgatcggacagaagagactggcagtgcggacaagcttgtccaatccaataaagatatcacacaaatcaacacaaaacataatatgagttccataaaaacaatagcagaacgatttgccgccctcaggtcgatgcaggaaggaaagcccgtccatccctcgtcaaaagactatcaggccatcgcccggattgtcgcccgcggagtgtctcttccgcaaacaatcaaatggcttgaacaatgttttgaggagtatgaggcgcggcgccgaagccgtcatgaaacgatcaaggtcttcagctactgtgaaaaatatatcatcggccggctggctgaagcggaagcgaaaacgaaaacaactgtcaggagggagaacaatgcccaaaagaacaatcgaagaggtcatggacgaactgagaaacaggagccgtcaatcacaggggggcaaaccggaagaatccgccgcaaaacggtatgactgtccgaagtgcaaagatgaactcggatttatcgaacggcgcggaacgatggaagtatgggtatcatgcgtctgccgcgaatggcgcaaagcgcaaaagctgttgaagacgagcgaaatcaccgaacaatttaaaaacttaaactttgctcaattcaagacggaaggaaagcatcaatctgtaaaagaagcgtatgaatgcgccgttgaatatgtacaagcttaccgggacattcaggaaagccgcagaaacagcatcgcgctcttgggacgacccggttcagggaagactcatttgctgacggctgccgccaatgagctgatgaggaagctttttgtacccgtcctgtattttccgtttgtcgaaggattcaatgatttaaaacaggacttttcgttgcttgagaataagctgaaccggatgaagcaagtcgaggtgctgtttcttgatgacctgtttaagccggtggcaggcaggccgcgggcaacggaatggcagatcgaacagacatatgccgtcgtcaattacaggtatttgaaccataagccgatcatgctgtccagcgagctaagcgttgaagaaattgtcagcatagacgaagcgctcggaacgaggctggtcgaaatgtgcggggactttctcgtcgtcctgaacgggagctctttcggcatcaatcatagactggaggggatggtttgatgtgccggctatgtaatgggagaaaatcaatccatcaggacgcaagggtcggaacgattttccgcgcttgcccgaactgctgcactgaaagcggcggtttgacggatgtgatcaaacatctggaagcgctgattgcaaaaatgaaaacaagggtgacacaaggtgcttaaaagtttaaaagctatgattctcatcatctggacagcggcaaaaagagacgcacaaattaaacgatggcacgaagaagacggaaagtgaggaaagacatacgtgaaaaacgaaagtgaggcgtacagcccatcaccatggcgcgtcgtcagaacaaataccgacgtatacatttattcagcatacagcaaagccgaaaagaaacggtttccttattccaacggaagggtgattgccaaagtcgccgactacagcgcatattccaaggaaaaaaatgcccgcttaatcgctgcagctcccgaactgttgaccgcagtgaagctcacgcttgcctatttgaagcgaaaacggcccgttcacagcgattcagttgagaatcaattgaagaatattttagaaaaagtcgtcgcaaaagcagaatttgaagaggaggaaacaagatgaaccatccggcaaagttaacagatatcaacgatacgacggttgcaagccgcatcaaaaaaggaaaggtgacggtgatcgtccttgacggaatgaacggcacggcatggcaggccgaggcgcctgagcacggcaaaaccgtcattgaaacgagaaagggagatctcgcaaggatcgaatttgaaatcggctataagctatagctctacaacttgaatatttgtccaagacggaaagcctgcggacgctgatcagatgcacatcttaactgtgcggctgattggtgtccttttttatttcaaaaaaacggaggtacattaaaatggaagatttgcttttcgaatataaaagagcgctgaaaaacacgaaaaaattgtataagccctatcaagatgaacaagggctgacggctgaacagctgaatgataaaaaactgatcagaaacatgatgaccgatttggaatatgtgatcgactggcttgaaaacggaagagaacctggaatcagacgggcgattgacaggcgcgactcttataagcggatgctcctgaaagatccgcggatcatcgacacgttttcagaacagagtgcatttgaaccggctcaggaagtgtcagcatacgataaagcccggattgaatcagcgctgtctgcccttacggcacgcgaaaaagaaatcttcattttacataaggtcgaacagttttcctatgagcggattgccgccatgctcggcatcaaaaagtctactgttcaaaccaatgtgaaacgggcgcagctgaaaatcgcgaaacagatcgaaaagcctctcgattgtatggcataacgatatatctgtcttttgtcatacgtttgccacctataagtgaaaagagaaaaaatataacaaagcatactgttcatatggaagattcatatagcgattaaatattactgtttccgagaatgagaggcggtgaaaatgaacaatgccaaggaaaagggatccaaaaagggatgaagcttttcgtctctatcaaaaatacgggggaaacattacgaatctcgcaatcgcaagagaactcggcgtttcaaataaaaaaatcagcgtttggaaaacccgcgaccgctggcaagaggctttagccggagatgacgcgaaccgtggaaaagcagacattcacaatgaagggctgaatgaacggcagcggctgttttgcatctattatgtgaaaagcttcaatgccacccaagcggcggtaaaagcgggctattccccggccagcgcccatgtgacaggctgccggcttttgaaaaatgaaaaggtggccgatgaaatcaggcgaatcaaaaaagaaatggtaggggagatattcgtcgaggcgatggatgttctccaagtttatgtaaaaatcgcgtttgccgatatgaccgattatgtgactttcggcaaaaaagaggtacaggctgtcggaaagtccggaccgctgtttgatgaagaaaacaatccggttatgaaagaggtcagctttgtggatgtgaaacattccgacctcgtcgatggcacagtcatcacggaagcgaaactcgggaaagaagggatcgcgatcaagctggccgataaaatgaaggcgctcgataagctctcacagtattttgaccttttccctgattcatttaagcggaaaattgaaaatgagaagctgaagctcgccagacaaaaagccgacaaagatgcggaaacgggtcccgttgaagtggtcatcgcccgaaaatgtgatcaggcttgatcataaaagaagtcaatccgcattttgaagattatttgtttaactgggatcagacctttcaatttcttgtcggcggatacggttcgtcgaaaagctatcataccgctttaaaagtcgtattaaaactgcttcaggaaaagcggaccgctcttgtcgtaagggaagtgtttgaaacacacagggattcgacgttttctttattcgcatccattatcgatgagctgggtgtccaaaaggcggctcaggcggtttcttctccgatgcatatcaggtttgcaaacggcagccgaattatttttaaaggaatggacaacccggcgaaattgaaatccgtcaacaacatctcgctgatttggattgaagaatgttcagaggtgaagtatgaaggcttcaaggaactgatcggccggctgaggcatccttatcacaggctgtatatgatgttgacgacaaaccccgtcagccagtcaaactggacgtacagacactttttcaaggatgagcggaacaagcggttcattttggatgatgaggtcttgtataaaaagcgggtcgctgtcgtcggtgatacgtattaccaccattccacagctgatgacaacctgtttttgccaaaaagctacctcaaacagcttgatgatatgaaagcatatgatcccgacctgtaccggattgccagaaaagggcggtttggggtaaacggcaccagggttctgccgcaatttgaagtgatggagcatgaggaggtcatgaggcagatctccgccatttccaacccgctgaagagaaccggaatggatttcggatttgaggaatcatacaatgccgtcgtccgggcggccgtcgatcccgacaaaaaatatctatatatctattgggagtactacaaaaataaaatgacagatgataagacggccgaagaacttcacgaattcgcggttacgaaggagctgattaaagctgatcccgctgagccgaaaagcattcagtttttcaggcagaatggttttaacatgacagcagcacgcaagttccaaggctcgcgcctgcaatatacgaaaaaaatcaagcggtttaaaaaaatattctgttctgaccgatgtgccaatacgatctacgaattgcagccgctgacctatgcgacggatcaagacggcaatctgaaggaggatcagtttacaattgatccgcacacgctttccgcgctatggtacgcgcttgatgattatgaagtaaccgatttgaaggctgagccggaagtgagaaaacggccgaacaggaaaagggggagatagcgtatgtccactcagcaaacggtaagagcgaaagtcatgaaatcccgttttcacgggcctgtaacaaaacaaatatatgaagatcaattttcggagatctacggcgatgatattatcgctccgccgtacaatttgaaagaattgaaagccattgccgaatattcttcaattcttcagcaatgcattgacgcctataaaacgaatattgcggggttcgggctcgatgtagaatacgcttttgatttcaacggggcggatgtgacgcccgatcggaaaaaagctgctgagtccgattggacaaggcttgaagatttttgccgccaccttcattttgacgaatcggctgaaacaattttaagccatatgatagaggaccgcgaaaaaaccgggaacgggtttttggaggtgctcagaaacggtgcggggcagccggccggaattgaatatctcgatgtcaaaaatatgcgggtatgcggattgacagaaccgatcgaagttgaattcgcctacatggaaaacggatcgctaaaaaacatcaagagggagaaaaggttccgcaaatacgttcagatgattgacggcaggaaagtgtactttaaagagtacggcgatccgcgcgtcatggatatgaccaccggagagtttgacaggcagactccccctgaacgaagcgcgaatgaagcgatccattttaaaatcggcagcggcgtctacggcgttccgcgctggatcggaaatattgtcaacctgtacggggcgcggaaagcggaagagctgaattatatgtacttcagacaaggccggcacgtacctgccgtcattacggttgaaaacggcatgctctcagaggcttcctacagagagctgcaggaatatatgaacgacttggaaggcgttgaaaatgcccacaaatttttgctgatcgaagcggagggaatcgcacaggaaaaagacattcacggcagccaggacattacgccggtgaaggtggacatcaaatccctcgccgaaattttgcaggaagatgcgctgtttcttgaatatgacgagaaaacccggaataaaatccgctcttccttcaggctcccgccgctctacaccggtgatgcccatgaatataacagggcgacagccgataccgcccgcaaaatcaccgaagaacaggtttttgaaccggagcggaaaatattgatcggcaagctgaatacgctgtttctccgcgatttaaacattttccacgcgaggctccagctgaaaggaccggactttcgcgatccgcttgagatcgcaaaagtgctcggtccttttattcaggcaggagcagtatctgcaaatgatttgcgcgacctggccggcagagtgctcggcaagacgctagatgaatggccggaggaagaattcagcaggccgctcgtttaccaggaaagctcaaagcgtgcggaagcggaagcaggagcattgctgcctgaactgcaggaagccgtcgagacattgaaacagatcactgaaaggaggtgaacatttcgtgccgagagagcttaaaaatgccaaaatcaatttcgtcagttatgtcgacaaagcggcgaacaaaaagaaattcttcatgacgaagtcgagtgaaccgccgacatttcaaaaggaagtcaagctgattgcaaaagccgaggatgaaaagaagctcgtctacggcgttgtctacgagccggacattcaggatgcccacggcgactttatgacggctgaagaaatccaaaaagccgcccacggttttctgaaaaatgcccggaagatcgacaaggatcacaatttccagggaggcgtcggagaagtcgtggagtcctacgtagcgccggctgattttgaagtaaacggcgaaacgattgtgaaaggctcttgggtgctggtgacaaaagccggcgatgagatctgggaacagattaaaaaaggaagcatcaccggctacagcatggcgggcactgccgaaacggtcgagcacgcgccccaagccgactctgaaaccgatgagcccggcagtttctttcagctgtttaagcagttttttgccggcgacaaacaaaaaacgggagaggaagaaaaaaagatgaaacgatcagaagttcaaggaacgattgaagccgtcttggctccgcttctcaaacgtcttgacgatttggaaggggataaagcggcagatgaaaaagagcaacagacagaccaagacgcacatgtgaaggaaatcgtcgaggacatgctcgcccctcttattgcacgcattgaagcactcgaaaagatgagaggcgcctcaaagcaggcagcagccgaaaaagacggggaagaagaagttaaaaaatcgatttggagcggattgctttaatttggaggaggaagacaatgagaaatcaagagattattcgtaaagccgagatgtcgcttgcgactttgaaaagcggaggattaatgaatccggcgcaggcttctgcatttattcgcatggtgcaaaacacgccgacaattttcagcgaatcgcgcgtgattcaaatggaaaacgactcgcaaaaatttgaaaagatcggctttggccagcggattttacgagcggctgatgaaggtaaggcattggcgaaagatcaattaaccgcaccggtgaccagcacggtcgaactgaacgcgaaagaagtcattgccgaagtcaacatcacttatgacacgctcgaaaataacattgaaaaagacggccttcaacagacgctgatgcaaatgctggcggagcgggctgccgttgatattgaagaactgatcgtcaatggtgatgtcgcatcctcagatccataccttgcccagctcgacgggatccggaagcagtccgtctcccatatcgtcgatgcgggcggggagcaaatcagccggcagcttttcaaacaggggctgaaagctgttccggcaaaatatatgcgcgttcctcaggaattcagattcttcacatcgctcggccaggagattgaatggaaagaccgcgtcgcagaacgtcaaacgactctcggggatgcggcggtacagggcggactttctaccgcttttggcgtgcctgttaaaggggtctcaaatattcagccgtatgcatacggagaaggagatgcggccgccgaagcatcagacattattttgacgcacccgaaaaatatcattctcggtttctcgcgcaatatcagaattgaagtcgataaagacattcgcgcgcgcaaattcatcattgtcctgacggcaaaactggacagcaaattcgaggaagaagacgcggttgcaaaaatcatcaatgtaaaagagtaaatgctgagttcgaaccgttccaaaggaagaacagccgaccggcggaaaccgagcccggacaacagctaaaagctctggaaggatgtgatgaacatgctgatcacgcccgacgatatcatccaatattccgttattgaagccgtgaaaaaccggccgcaggaattgctgcgtcaggatatccttgaagctgaagcggaagccgagcagataacggggcaccgttttacagatgaaaaatatgatccgctgccggaaaaggcaaggctcgctttgctgcagctggcacagtactttgcattgaaaaacggtgatgaatcgcttttgaaaggctacaaatctgagaaattgggagactactcctatacgctttcaagaagcggaggcctagtgaagcccgacgtctataaactgctcgaagaatttattcttgattatgaatctgttcgattcaaggtgcgcccgctatgagctacaaaaggttattaagcgaccgctgcgatatctatcatttaaaggaagaccaggctgaggaagcaaggtacggcattcctgcgcgagacctgcagccgattcgcacatacggggaaacacctgatcttcaaaacgttccctgctattttacggaaaaaaaccagtcgatcgtccagcaagatcccgaacaggttatttatcattcatatttggcccattttccggcggaggcagatgtgcgccttcacgataaggcggtctggaacggtgtcgcctacacgctgcagcagccgcgcaacatcaaaggccatcacctcgaagtgttagcggtcagggatgaaaaactatgaaaatcaaaggattgaaacagctgtcgcagacgctggaaaaagcagggcagagcggctttcgaaatgaagctgccaagtggcttgaacaggcgggaaccgattttttggacctggtctgtgacgaaatcgtgcgcgccggatcgattgataccggcagccttttgcgctctttcaagcggggagccgaagggaacaggtgggaaatcgaaaaaggcggactcacgcttgaagtcgggacggagttagagtacgcctcatttgtaaatgacggccattggacaggcggaaaagacgaagtcaggtgggttccgggacaatggcacggcggccggtttcaatatgatcccggttcatcgtccggcatggccttaaaacggcaatgggtaaagggaacaggctattgggagcatgcgctttacatatttgagcgtttatttgaaaaacgcctgaatgaaaggctgcaaaaatggctgaattccctttaaggaggtgaagctttgaacgacgaaacgggatctgtcatgaatttcttttatcaagtctttcctgtcgtctgttatgaaaaggaaatacccgaccactttcaaataccgtcgctgtattttcctcccccttctgtttttgatgagaatgatacggtttcaacatttaaaaaagtcttcaccctgaatgtgaaactgtttcaccacgattcgcagcaggcccatgatcatgccgagcgcattgcagacgccgtaagggaagcgaggcacatcataccgctcattgaccgatcgggtaaaggcacaggggacagcttgaggatcagccggatcgagacgagaataggggattccggcaccgcgtccattattattcaatggaacagccgctactggtacaaacgggaaagcgaactttctctggaaacaattgattttacaaacggggtgaaataattggcagtcagcaaaaaaacaaacaccgaagcaaaaaaggcgcctcaagaggaacgtgaagcgctgttctacatcgaagacctgagggagcacgcgaaagagcttttcggcattaagccggaagttctcgatggtgctctttttcatgtgaaagaagagcagatttcaaaacctgaggcaagtcagcttattcaaacatttttagccaaggaggtcatgaattaatgaacggcggaacatttacaccaggcaaagaaaaagatcgtgccggcatttattttaattttaaaacgacagcagaggaacgcgtttccatcggggatcgcggtacagttgccctccctgtcgtcatgagctggggggagccgaaaacattcgtatcgatttccagcattgaagacttaaataaaaaagtagggttgaacatcgatgatccgtctcttctgcttttccgggaagcgaagaaaaacgcacagaccgttttgctgtaccgtctgaacacaggagcgccggcgaaagcccaaatcggcgaaacgctgagcgtaacggcaaaatacggaggcgagaaagggaacgacatttcgatccgcatttccgaaaatgtgctcgattctaaaaagtttgatgtcaccacctttgtcggaacagatgaagctgaccgacaaaccgtcaaaacggcagaagagcttaccgcaaatgcgtacgtcgcgtttcaaggggaaggcgcgcttgaactgacagcgggcacaaagctgtcaggcggggagaacggaacggcaagcgttgccgattacaccgcatttttagatgctgccgaaacggaatacttcaatacgatcgcactcccggtcgcagacaatgaacagctgaaagccacttttgccgctttcatcaaacgccttcgcgacaagcagggccagaaagtccaaggcgttgtcgccgattatgccggagactatgaaggcattattaatgtaacgggaggcgtcgtgctggaagacggcactgaaatcactcctgaaaaagcgacggcatgggttgccggagcgagcgcaggcgcgacttttaaccagtcgctgacatttgtcgaatacgaaggtgctgttgatgtcctgaaccgtctggatgaagaccaggtcatcgaacgtctgaaaaaaggcgagtttttatttacatttgatgcacgcgatcaatcggtcagcgttgaaaaagacatcaactctttaacgagtttcactgccgacaagaacaaaaaattctcgaaaaacaaaatcatccgcgttctcgacggagtcaacaatgacctgacccgcgagttaaaggctttaatcaaagcacgaaaagcaagcggcagcgacatccctgcatcagacgatggtttgcaatacgtcaaaacgctgatcattcagtatatgacggcgcttcaggaagccggcggcattaccggctttgattctgaaagcgatattgccattacactgaatgaagaccgcgacgggtttttaatcgatttagccgttcagccggttgatgcagcagaaaaattctactttaatgtggaggtaaaatagtatggcattaaaagcgcaaaacacgatttccggaaaagaaggccgtctttttctcgacggacaagagatggctcacatcaaaacatttgaggccaatgtcgaaaagaataaagctgaagtcaatattatgggccgccgcatgaccggccacaagacaacaggggcaaacggcacgggaacggcgacattttataaagtcacgtctcaatttgtcacgttaatgatgaactatgtgaaaaaaggcgatgatccgtatttcacgctccaggccgtccttgacgaccagtcatcaggccgcggaacggagcgggtcacgctgtatgacgtgaattttgactcggccaaaatcgccggtcttgacgtcgactcagaggcgctcgaagaagaagtgccgttcacatttgaagatttcgacgttcctgaaaaactgaaagatacgttttaaaataggagccgtatacaacgagcccgcttttcaaaaatagaccgcaacagccggtctatttcttcttttttacggaaggaaccgattcagtagtcaggaaataggaagcaaagcactctcgccaagccgagggtgctttttcattgcaaatccaaaattgaatgttaaaggagcaagcagacatgagcgaaaaacaagaagaaaaagtatatgatttatccttttttatgccgggccaaaccgttgaagccgaagaaatcaaagtgccgatctcaaagcggttcgtcgataaaaagggcaatgtcattccgtttgtgtttaagccgattacaaccgagcgcattgacgagcttgaaaaagaaaatacgacttataaaaacattaaaggcagaggccgtgtcaaggatctagacacccagcgcttttacgccagaatcgccattgaatcgacgatctaccctgacttccgttcaaaggaattaagagaagcctataaaacggccgacccggtcgaagtggccaaacgcgttctctccgtcggtggggaatatgcgaactggctcaacaaagcgattgaaatcaacggctttgaagacgatcttgaagatctggaagaagaagcaaaaaactaatcaaggatgggaataaagaagcggtgtatctctatttcgcgatgcacgaacttcactattctccatcccagctccgggagctgtacgaagccccaaaaccgtttaaggcattattatacggactcatcagctacaaacttcaactcttggaaaaagaagcgcggaaaggaggtacataatccatggcaaaactgacggcacgttttgaacttgaagaccgggtgtctaagaagctgcggaggattcagaagggttttgcgattttagaaaagagagcagaacgattgaaccggcaaatcaaaattaacattaaaacggaagatcaagctttttttcggcttaaaaaactgaacaattacctgatgagaaagttcattcactccgtaaatattggagtgaatataaatgaccaggcatccgctcaactaatagaaatacaaagaagattaaaaagaattccgccagaaacaaccgttaagttaactttagcagacaatgtctcgcaaaagttaactaaaattaaaaggatgctctctaagcgtgaatattccttatcaatctctgctgaagaccgtgtaacattaactgttaaaaaaataatcggctatcttaaaaacaatttgaaaaaaggttattcagttcagttatatgtacttgataaagtaacgaaaacagcaagcagaattgcctcgctcctaaaaaaactagagaaaacgtacattgtcacaattgatttaaacgacaaggcgaccaacaaaatcaaaaacaaaaaagtttcaggagaaacatcagaagccaaacacgataaaaagggatctttctttgaacaaggaaaagacttgttaggcgaatggtggaaaaagtcaggatggccttggataaaggatactgggaaggaaattggcaaagcatttgtagatcgatttaaagatagactgatggaaaaattgaacagtgatatttttgacaaaatcattgataaaatcttagggcctcagtcaacaaaaggttctcagtcaaaatcaagcggaccaggccatggacaatgctgctgctgtttatatccgcagaaagagcctccgaattcagccggaaataggcaaaatgtctctgtttcaggttcaagtgaagagcataaaggctggaatctaaaaagcttatcaaggggaattcttccagccgcaaagatactcttctatttaaaaagtttaaggcccaacaaagagcccggtaaacttgcaaaattattagagcccttaaaaccaatgattgaaaaattaaagccgctaggtaaaaaactaagtccgctaggcaaacttttgccgcttacagatctaatcggcatcaacaaagataacgcaggcgaaaaaattggttctgtaggcggccgtatgttaggaacttttggtggagaagctgccggaatggcgatcggaggattggttggaggacctccgggtgcaatgattggaggagtagtgggcggctttgcaggcgggatgggcggtgaaaaggcaggcggttccctcggtaaaatgtttgacacttcccaattgaaggaagatctcatgaacacgctgtttaatggagactggtggagcgaacagtgggattcccttagtcaaaccgctacaaatacatttttaaatggagactggtggggagaaaaatggggatctcttaaagaaacagccacaaatacgtttttaaacggaaactggtgggctgaacaagccggctatctttatggtactttggaagctgcatttttagggccgttaagtaatgtttggggaaccattgcaggaacgatcagcgagacgatttttaacggagactggtggagcgaaaaatggaacaatgcagtaacatgggcgcagaatacgtgggacggagctgtctctgtttgggaatccattacaggaaccattaaagacaccgtttttaatggagactggtggagcgaaaaatggaacaatgcagtaacatgggcgcagaatacgtgggacggagccgtctctgtttgggaatccattacaggaaccattaaagacaccgtttttaatggagactggtggggtgaacaatgggacaacgcagtgacatgggcgcagaatgcgtgggacggagccgtctctgtttgggaatccattacaggaaccattaaagacactgttttcaatggagactggtggtctaaccaatggaatagcgctttggaaaggggcaagagtattttcgaaggcgcgaaaagctgggtcggagaaaaagttgaatattttcagaaaggtcgggaaagagcccataaggatcatggatttgaaggctatgccacaggcggctacatcacaaaaccgaccatctcctggatcggtgaagccggaaatgaattcgtcatccctacggaaaacaaccggggacgcgggaagatgctgcttgcccaggccgctaccaagctcggcatgcgcgttgttgacgacatgggggccgcggcgggagacgggggagcttcttctccggtttcaagcaccgcttcgtattcggcttctgtgtcgcctgctgtcggtgtcgggagtatagcagcagaggcgcaggctttcggccgggaattcaccggcggttttgacaaggggatcggctcaaacgctccttcccttgatcaatggaagcaaaaaaacatcagcaagccgtttagcagcctgccggcagaatcgtctaactacggaaaacagacggttgccgggttcgcttccgggcaaaatgcttccgcgaccggaaccggcggttttcttcaagcaaaagtaaatgcgccttatcaaacaacggtgaaaacgtcctcttcctggggtgcaaatacagtcaaaaactttgcaaccgggcaaaatgcaacaccgaccgggacgtcgcagtatgttgataaaaatatcaacaagccgttccttgattcgaaacagtcggctgcaggctgggggtcaggaatggtcggacactttatcagcggcatgaatggaaaaggcagcgaagtttctcaagctgcaaaaaacttggcgaaaaaagttgaaaaagcgttccgcgaagaactagatattcattctccgtcccgggttatgatgagtctcgggcgtttcgcgtcggtcgggattgtcaaaggtttaagctctgtcgatgtcaaaagttttgcggaaaaacaagcaggctcactggcagctgcgttttccggaatcggagccgtcggcggaaatgtaaagtcgtggctgatgcaggcgatcatggctaccggttcgccggtgtcgtggcttcagccgctttctgttattgctcaaaaggaatccggcggaaatccgcgcgcctataacggctgggacattaacgccaagcggggggacccgagcagaggcttgatgcagacgatcggccaaacgtttaatgcttacaaaggaaaaggaatgaatgatattttcaatcctgttcacaacgcggtagcggccatcaactacatcaaatcgcgatacgggtcgccatttaacactccggggattaaaagcatggcaagaggcggagcttataaaggctatgccaacggcggcctgattacgagcgagcagatcgcccgcgtgggtgaaggcggcaaacgcgaatggatcattcccgaagaacgcggcatccgcggcagatatctgcttcagcgggctgcaggcgcgctcgggatggaagtgcaagaccccgctgaagggtccggttccatatcaagtgctcaggcggctgcagccaccacgggcgggacccgatcccggcagcctgctgaaaatggcgccaaagaagtcaacatctatattaccggggacaatcattaccacagtgagcgcgaccaggaaacattgattgcgaaaatcaagcgcgctcttgtcgatgagcttgaacgggatattcatattgggacgaaaggaagcgtagcttatgactaaatccgtgtacgaattttggctgacgcaaggaaaggaaaagctgcgcctccctgtgcttccagagcagcttgacgtcagcaataatcttgcgaacgaatctgtaaaggtgtcaaagttcggcgaggtgacgtttatcaatgaaccgggagcgaagacgatttcattttcgtctcattttccgaaaaagtattctccgctctcggaatacaaagggtttctttcgccggagaacgcgattcttaaaatcgagaaatggatgaaagcaaaaaaaccggttcaatttctcgtgacgggaacgaagatcaatttcacatgcagcattgaaaacttttcgcatcgcgagggtgaaaaggatatcggcgaccgggattttgatctcacattgaaagagtaccaaacagcatcaccccggaagattaaacaaaaaaagaaaacgaagaaaaaacggccgtccaaaccggctccaaaaatgtacaccgtcaaaaaaggcgatacgctctggcacatcgcaggccgtttttacggaaacagccaggaatggcggaaaatttggaatgcgaacaagcaggcgatgatcaaacgaagcaagcgaaacatcaaacagccgggacattggatttttccggggcaaaagctgaaaataccataaaacgaagcgccggatgaaccggcgtttttctggtaaatcaaaagcaggggatagcgatgatcgaattatttgtcataaaagaaagcgaatggtatgaacttgtcaccgaaagcgtcacattggaaggagaaagataccaggcgcctcgttcgatcgaagcgtcgattgtgatcaagcagggaagccacaaatattacagcgtgcaggaaggcgataccgttttatttaaatggaaaggaaaagaactgtttcgcggaattgtgttcagtagggtgccgaaagaatatacgcttacgtttaaagcgtacgacatgcttcagtacttggtgaaaaaccaggatgtctatgtattctcgaacaaaacggccgctgacattgtcaaacgaattgcgaacgactttcaaattcccaaaggttcgattgcaaacaccggacatacgattaaatcgctcgtctttaaagacaatacgagcctgtatgacattattttaaaagcgctgcgggagacaaaaaagcaaaccggaaaaaactatcagctgtatgccgaaaaaggaaagctgtgtttacgagcgtggcccgaaccggaggatatctgggttttggaaacgggtgtgaacattacggattacgcttacagcacgtcaatcgatgaaacggcaacccgggtgaaactgagaaagcagaaagataacaaaacctataccgcatccgcaagcgatgaagccggtatgaaaagattcggcgttctccagtacacagaaacggtttcggatgatattaacgaggcgcagctccgcgaccgggcgaagaagatacaggctgaaaagaaaggcgtcaaaaaagagctgaaaagcatacaggcaatcggcataccggaagttcaaagcggactgccggtttatatatcgattccggaagcgggcattaaagaaacctattgggttgataaggataaacacgattttacaggaacaaaacatgtgatgacgattgatgtcgtcgctaaaaacaccatacctgaaggagcgtcttcatgaaattaagcgatgcgataaaagagctggctcttggagccgtaaacgctgaatcgcctgtcgatgtcatgccggctgaagtcgtgtccgcgtctccgctcaagctgaagctccgcaatcatgataaattggtgatcccctccgacttattggtggtggccaggcatttgacagagcatacggaacagatccgaattgacggagaagacaaaacgattcgcttttacaatcaattgcatgccggcgaccacgtgatgattgcggctatgcctggagggcagtctttttttgtaatagacagagtgtaggagtaggaggtggctcggatggctctttcgccggaagtatcttttgaagatatcgaggatgacagcgatgtgattgagacttcaaaaacgtacaaaattgattttgaaacaggcaggatgacgggtgatatgatttcggggctggaagccgtggaacaaatggtttgtatggcgctgagaaccgagcgctacgcatacgccgtttacagccataatatcggaaatgaactgcaggaggttctttcagatcatgaaacgaccgacgcttataaagaaatggagataccgagattgatcgaggaagccctcatatacgatgaccgaatttcggcggtgaccgacttcgagattgagcgtcaaggcgatgccttccacgtgtccttttcggttgaaaccgatgaagggacattggaaatcgaggaggtgattggggaagatgtttgaagaccagacatttgaagagatcatggaacgcatgcttgagcgggtttcagatgagattgacaaacgtgaaaacagcgtcatttggaatgcgcttgccccggcagccgccgagctggcgctttcttatatttggcttgatcaagtgctgaatttggtttatgcggatacggctgaaggcgaatatttggacagaagggcggctgaggccggtcttgagcgctatcgggcgtcaaaagccatatggtctgcggcatttacggatggagtatcggttccccccggaacccgtttctttctggaagatttatattttaccatgctcgaagacggcaagctggaatgtgaaacagccgggacaaaaggaaacgccaatttttcggggcggcctttgcttccgctcgataccattcccgggcttgaaaaagcggttatgggaagccttgaaattcccggccgcgacgaggagacggatgaatccctgtatgaaaggtatttaatccgcgtccgtagggaagcggtcagcgcgaatcagctgcattacaaacaatgggccgaagaagtggacggcgtaggcaaagcgaaggtctttccgctgtggaatggcgagggaaccgtaaaggttgtcattacaaacgcgaaaatggagccagccacagacgcattaatcgaaagagtcaagcagtatatcgatcccgatccgggcaaaggggaaggtatggcgccgatcggagcttataccgcggttgaaagcgcggtatggaaagacgtgagcatatctgcaaaaatcatacctgaatcaggccggacgatcggtgaggccaaacaggaaattgcagaaaaaatcactgaattatttaaagaaatggcttttaaagaaagcgtcatccgtctctcgcagatcaacaacatgatctatcaatcgtcctctgtcagcgactattcggaagtcttcatcaacggggaagcgaaaaatctgcagttgacagaaacggaaattccaaagctggggcaggtgaccatcattgagcaagattgatgaaatggcttttcacctgccgccatacttgatggaaatccgggaaattcaagaaattacaacggctgaagcgcctgaatttgagaggcaaaatcaagagattttcgatatgacggaccagcttttcgtcacgacggccacatgggggctggacaggtgggaaaagattttgaatgtcagacgcgaggcttcggacggcgtcgatattcgaagggcccgtctgttaaccaagatgtccaatattccgccgattacaagccgctcgatcgagcgcgcggttaatgcttttttaaaacagccgtccgcatccgtcagactgacggccggacggtatcattttttgctgagtgtaaacggagaggatctgcagtttataccttcaatcattcaaaccgtcaatcatatgaagcccgcccatttggcttatacattccggggcgggtttcattatgaatgtcggccgccgaaaagcattcatgacaggctcgttttaagaagcaaaaacggctttttcggtacgataccggtctatttggacggacagtatctgcttgatgatgcattctacttgaacggttttcgagaaatcgacggactgccccgcaggtttaaacagcagctcacactgcgccacaagaagcggcaatacattcggtccgcctccagctttacgataaagacggccgctgaaaaccggcggaaacagcaaacaaaagctggcatgaaaaccggcattaccaatcaaaacaaaaaggtccaatccttcaaaatcagctgcaaatgcgaacatgaatttaagcaagcaggcgcgcttgaaatgagagagaagtggtggacgctaaacggcgcatttttgctcgacggtacaaagcagctggcagcagcggcgcaaaaaatcgcattgtaaaggagaaatcaaaatggcacaacaattaacagtgacaacgctttatgcgagacagcaaatggcaaaagcacgggctgagggcggcaagctcaccaaaatcacaaaaatggctttcggaaacggaggtacaaacgataaaggcgaacccgttcctctgcagggcaacgaacaggccctgaaaaacgaacttctgcaaaaggatatcgacggctttgcctttatggagccggcgaaagtccgctatacatgtacattgggagaaagcgaactcgcaggggaaacgatcaacgagctcgcccttgtcgatgaagccggaaaattcacagcggtcagaacgatgacagacaagcagaaagacggcgacatcgagttcgtctttgaaatcgacgacatttattaaaggagctgaaacaaggtggacatccaaaaaccgagacgctttgaaacaacagaccgcgcccatgccgacttgttcaacgaagcgatagatcagctgaatgtaaacgatgaacggattgcaaagcgggctgaggaagctgaagaaagggctaaaacgtatactgatgcccatgcagccaaaaaaaataatccgcatgcagtgacaaagtcccaggtgggattaagtaatgtgatcaatgaaaaacaagcgacaaaagcggagtttgattcacatagcaatgataatgaaaggcacatcacagcaagcgaacgaagtaaatgggacggcagccagattttcaatattactacagagaatggccaaggtaaagtatacatcggcgtggcagatgattttcatgaggttctcccccaatatacagggctaatccattttacggcggcaggcggtgcttcaaacagccctggaaacgcagttcggggaatttggacatgtaatgccaccggtgagtacggacaagttattgcatttgacaacgcaaatagaacgtacaggaagacagtggccgacggaaagtggtcggactggatagagctcgcctcagctgctgatgcacagttgtataaaattacgggagataacggccgacgtacaaagttggccgacggaacggatttattaacgatgccgacaggtttttattatgctattggccatgttgttcaaaacaaccctgtagaaaatgacagctcctggttcaattacgatgtgattgaaactggtgccggaagaaagaccatccatgcgtggcggagctatgataatacgttatgacatggaaccgttcatacagatggtgtatttaaaggatggaaacgcattataaccgacgttgattttacaacgatgaaatggtatgacttgacgctgattaacggaaataaagcgggcggaagaaagccgcaatacgctatatggggaaatcaagtgtttacgcgcggggaagtagtatctccagattttgcgagtgtttttgctattcttccggcggatgcaagacctattacgcaaaaatcgatggccgcaaccctctttggaacaactggcacatcaaaatatatagccgaaacaaacggagaattaaggctcgttggaaagcatgccaatattgaagccaatatatcaggcgtctcgctggataattgcttcaccatataaggaggaaaaagagaatgcaagtctttttatacgatgatgacttctattataaaaggcctgagattatagtggatccgggttccatgccagaaaattcaacggctgtaaaaccgaaggatgggttatggagagcgaagtttatcccttcccttaatgattgggtggagggagcggatcaagaatatataaacggtttaaaaaaagatcaatttgttgagaagaatcctgtatcagagcagctttccgccctcggccggcaacttgcagatgaaaaactggctaggaagcaagctgaaatcgcaaacaaggctctcggtgagcacttggtatctttaaaactagaactgctgaatatcaagggaggtaaggaaattgaaacttaatttttgggtgcatgctttgtcctataattgggctactgcagaaatggtaaaggaagcaattgcttacgatgattgtactattgacgatttaagaaaaggtgtagagactgggtacatcactcaggatgaatttcaagaactgacaagtgaattgtaagaagagaatttttagtttaacaagggaaaggcagaggatttacaaaaaatctctgcagaacttaaagcgagactaaataacattagagttagtttaaaggtaaaaaaggaatatttgattaaggaggcgtataaaattggttttgaaaaaaccaaggcgctttgaaactacagaccgcgcccatgccgatctttttaataatgttgttgatcagttgaataagaatgatgagttaattgcagaacttgttaaagaagcagaaataaattcgaaaacatatacggattctcacacaaataatgccacgatacacattaacgatgtggatcgaacccgctggaattcaggtcagttatttaaattaacagaaaataacggaaaggtattttataaaggcagcgcagagacaacggattacaataccttgactgaaacgggtatgtatttaatctacaatgaagggataaactcaccgcccgcatcaaatcgtgtatttttacttgtcatgagtttcggtaatacattggtccagtgtgcttatgaatcatataaaggtgtacagtcatattttaggtttagaaaaagtgactctgtaacgtggacatcatggcagacacaggaaacgacaatcggggcacaggcaaaagtcgatgcacatgagcaaaagtcgaatcttcatattaatgaaactgagcgtgcaaaatggaataatggccagttatacaaaataaccgatgataatggaaaacgaactaaactggaaaatggaacagatctgttaactttgcctacaggcttttattatgctgcaggccatgtcgtccaaaacaatccggtagaaaatgatagctcttggtttaattatgatgtaattgagacgggctcaggcagaaagaccatacaagcctggcgaagctatgacaactcattatggttagggacattacacactgacggtattttcaagggttggaaaaaagtgatgacagttgaagactttaataaaagaacgtatgtagatacttatgatcatgaaaattcatctgtttctgcagaggagaatgttccgacaaaattagtgtttggtgtaacaagggctgatcatttagaagagtataatatatcaaattcagaaataactttaaaaaatagcggtctctatttaataaggttgtatgttactagcaaaaacattacggttaattcagagaatatattaagttgttatgttggaggaaaagagtatcaaagacttggtatttggtatcctgcaacaacaggtaatacatgtgtattttttctgcaacaaaaatttacagcgggtgataaagttactttttacattacgccaaggagtactgggaagaccgtaaccattgcgactgcatatgtcaccatgtcacaaattggataagtaactttttatttgattgaaatgaagacatatggaagattggggggactattcgttgacgatcttaaatgaaacaaacatctttgagaatgagttaaatggaattaaagctgatcaaaaatcactcgaacagcgcgtcagtacactcgaaagaacatcagaccgccacgatcagcaaatcatctcgattaacgaaaagctgaacaaaatcgaagagaatacaacctggattaagcgcagcatcacaggcgcgataattacagcggtcagcaccggcatcatcggcggcgcgattgctgttttttataatttattgcagaaataagggaggacatcatcatgaaacatatcgacaaaggcacggtcgtcaggacggtgcttctttttatcgcactggtcaatcagacgttgattatgtttggaaagcaggttttgccgattggtgaagatcagatcaatacactggcggacgctttgtatgtggccgggtctgcggcttttacaattaccgcatcacttattgcatggtataaaaataattatattacgagcagagggcggaggcagaaagaaacccttaaagaacaaggcatattaaaaaaataatcgctattgtactgctgcttcccttcgtatatccttaaaaaaggagggaagcctgttgatagaaaaagacttgaaaataagtaacattaaaggattgctaatatttttagtagtctttggacatttaatcgaattgtataaggccaattactatcaaatctttgtattgatttatgcttttcatatgcctttatttatttttataagcggttttttagccaaaagagcaacagtaagcaaaattatcaacttcattatattgtatattatttttcaatctttttttgattggtacttatattttataggtgattataaaaccttgcagtttcattttggcaaaccccaatttcatttatggtatatcgtaagcatgattttttggtatgctttggcgtggggtatccatcggttaagaccgcggaaagttggcaagacaataatctttctgattgtttttgcacttagcttttattcgcgctggtatactgagcctgtcgttgagtttataaaggaaatatatccgaatttcacctcatatacactcagttttcagcgtacaatttcttttgctccatttttctttgcgggatttttcatttccaaaaataaattgagaatgatttatgaatcaatcccagagcgtatagcaaaagggttattggcgattacagcggctgcagttattctctatattcaatacacttctaatttggaatcattattcagaggaagtttcggaatggagcgattcttaaatgaaggagagagttaccatgcgaaaataatgttgcattatttattatcggggtggctttgcttacttatcttaacgagtgtaaagggagaaaaaagtgttttaacaaaatggggagatcattccattgcgattttcttgttccatcctgtgtttgtatttttattgagaaggacggagttcatggctaattggaaagctgatactcaattcaccgtttactttgcaattgcaatattgatttcggccttgttgggttcaaatttcttctcgaaattcagtgcttttgttacgtcacctttaacaacactaaaaaagctttcaggtgttgtcagtcaaaagaaaaaatataatacagattaaaagtcctttggtaaaagggcttttttcttttaagagctgcctcaggcagttctttttttagttgaaaaggagtgttttaattggtcaaagtaatcaataactttgtaaaagtcaatcaatacacccgtcccgggctgaagcttgcggcagtcaaaggcatcgtcatgcattggacggcgacgcccggggcttcggcattgaatgagcgaaattatttcaatggcacatgcattgccgacaagcgttatgcgtcggctcattattttgtcgaccgccatgaggcgcagcatattattcccgatcatgaagtcgcatatcatgcgcatgatcaaaaccgctgctatgtcagctttctgaagccgaatgccaataccacggctctcggggtcgaaatgtgcgtggaaaaagacggtaccatccatgaagagacgattcgcaatgcggcagagcttgtagcggatttgtgcaagacatacggtttgtccacagatcggattgtccgccattacgatgtcactaacaaaggctgtccaaccccgtgggtgagagatgccggccaattgtcagctttccgtaaaagagtagattcccttttggggaggaaaaccgtttccgtatcggctgcctccaccagccagacaagttcatcgtcgggcattatcctcaaaaaaggaatgtcaggctctcatgtgaaaaagctgcaaacacgcttggtcgcggccggtttttcgctgcctaaatacggcgcggacggaagctatggagacgagacggtgcatgcggttgtttctttgcaaaagaaagcgggaattaaagccgacggcatttacggtccgtcaactgaaaaagccctctcggccgctgaagcgtcagcagccggcaagagcaagacgtggacccttcccgacggcatttataaggtgaaaaacccgctgatgaagggaacggccgtcacacaaatccagacagcccttgccgctctttattactaccctgataaaggggccaaaaacaacgggatcgacggatattacggaatgaagacggcaaatgcggtgaaacgttttcagctgatgtacggtttgggagcggacgggatatacggaccgaagacaaaagcgaaaatgttgtcccttttgaaataaaggaacttttaaagttcctttatattttttaaaaattttcaaaaaataactatcccacagccatacttgtatggtagtatggcggagagagggggtgagagtcatgaaaatgaaacaattaaacccgcgttctgtcagagatcaaatctatcaggtgctgaaggaagaaatcatgaagtttcggcttgttccgggtgagcagatatcggaaaaagagatttcagaacggtatgaagtcagccgcactccggtcagagaggcttttttgcagctgtcgaaggaagggcttctcgaagtctatccgcagaaaggaacccgcgtgtcgctgatcgatcttgacctggtggaggaagcgaggtttatgcgggaaaacctggaaaaggctgtagctgaactggcgtgtgaggacttcccgcaggaagctatgtttaagctggagcagaatgtgaagatgcaggaattatcgatcgcacagaaaaattatgaaagtttgtttgaattagatgaagcgtttcatcagacgatttttgaaggctgcggaaaagcgaatgtctgggctgcgattcagcagatgaacgttcccttccaaagaatccgctttttaaggcttgccgccgattttaactggaacaccatccatcagcagcacgcggcattaacagaagcgattcgaacaaaacagaaggcaaaagccaaggaaatcgccgaagagcatttgcagctggtcatcgtcgataaacagatgctcattgatgagtttcccggttatttcaaaaagtaagcgctttaaaaggagtggtgatgtgaaagctgcggtgatgacgaagccttattcgattgaatttcacgacataccgcgtcccgaaccggccagcggtgaagtccttgtcaagataaaggctgccgggatttgcggaagtgatgtgcatttttacgacggctcaaatccatatgcacagtaccctcagatctttggacatgagcttgcaggcatcattgaaaaaacgggggccggcgtgagggggcgatccgcaggcgaacgggtcgtaattgaaccggcgatcccgtgcggaggctgctacccttgtcggaaagggaggacaaacgcctgtatgaacatcgatatgatcgggtcggttcgcagaggagggttcgctgattttatcattgttccagaaacgcatgtccatccgattcctgagcaaatggattttgcaaccgctgctttgtgcgagccgttttcaatcggagcgcaggcggttcggcgggcagatattcaaacaggcgaaacgattgtcatattgggaatgggtccgatcgggttaacgattttggcgcaggtaaaaaagcgcttcgacgttcgtgtgatcgctgtcgatcctgtaagggaaaggcttgagcttgccgaggcattcggggcggatgccgttattcagcctggtgaagaggatgcagagcaaatgattctgaagctgacaggcggagaaggagcggggattgtgttcgaagcggccgggattcccgcgacgattgagcaatccgttcgtttggcggccgccgccgggcgcattgtcattgtcggcttaacggggaggaatgtgacgattccgggtcttcttctcacaaagaaagatattgaaatttatggaacaaaacacagcgtcaatcaatttcccggcgtcattcaatttttgaatgaaaaccctgaaatagcccgggcttttgtcactgagatcatgccttttatggaaatagaagaggcgttgaaaaaagcgaaaaactgtccccatcaggtcacaaagatcattttatcttattgaatcggtgaggaggaagtgtgatgaaaatggttttcagatggtatggagaaggaaacgactccgtgacccttgagcagatcaggcagattcccggtgtggagggaatcgtttgggcgcttcatcatcagccgccgggtgaagagtggccattggaagaaattttagaagtgaagcggcagtgtgaacagcacggttttcacattgaagttgttgaaagcgttaacatccatgaggatataaagcttgggctgccgacgagagatctgtatattgaaaaatacaagcgaacgattgaaaatttggccaaagccggcgtaaaagtgatctgctataattttatgcctgtatttgactggctgcggaccgatttgtacaaaaaggctccagacggttccaccgctttgttctatgagcacgcaaaggtgcacacaatcgacccttttgcgcttgtcgatcaaatcgccaagcatcccgaattcacgatgcccggctgggaaccggagcggcttgagcatctgacaaggctgtttgaagcctatcaaaatgtgacggaggaggatctgtggagtcatcttcactattttcttgaacgcatcattccaaccgccgcacgctgcggaatcaaaatggcgatccatcccgatgatccgccgtggccggttttcggactcccgcgcatcatgacttcaggagaaagcatcgggcggctgctacagcttgtcgatcatccggcgaatggcgtgacactgtgcagcggttcattgggcgccaaccccgaaaatgatatttccgccatgatccatgcgtatgccgaccggattccatttgcccatatccgaaacgtcaaagtctacgaaaacggcgattttatcgaaacatcgcacagaacaaaagatggcacagttgacatttgcgggattgtcaaagcctatcatgaaacaggtttttcaggctatgtgcgtccggatcacggccgccacatttgggatgaaaagtgcaggcccggctacggtctgtatgacagggcgctcggtatcatgtatttatggggcatatgggattcgctcaatagagaaaaacaggaggcttcaaaatgcttgaaatccatgaaaatttagcggggaaaactgcggtcatcacaggcggcagcggggtgctttgcggtgcgatggcgagagagctcggccggcagggtatgaatgttgccattcttaatcgaaccgttgaaaaaggggaactcgtggccgaagctatccgaaaagccggcggcgcagcgattgccgttgagtgtgatgtcatcagccaacggagcgttgaacaggcgaaacgcgttgtggccgaccgattcggcggctgtgatctattggtgaacggagccggcggcaatcaccccaatggcacgacatcagatgaaacattcaactccgagcacatcttccaggacaacatcaagacgttatttgatctgaactgcgatgatgtcggttctgttctcaatttaaacttcctcggttctttcattccaacacagcaatttgcaaaaatgatgctgaatcaaaaaggggcgtccgtgatcaatatttcttcaatgagcgctcaaaccccgatgacgaaagtgcctgcatacagcgcggcgaaagcgggcatcgacaattttacgaaatggctggccgtctatctggccgaaacgggaatcagggtcaacgccattgccccgggatttttcctaaccaatcaaaatgaaaggcttcttcttgatcaaaacggcgaatttacagatagagcaaagaagatcatctctcacaccccgatgaggcgtttcggcaaaccggaagatttgctggggacgctgctttggctggcggatgagaagatgtccggatttgttaccggcataacagtgccggtagatggcggatttacggcttatgccggtgtctaaaaacacgataaaggggaggccggtacatgaagcagattgtgtgtgaaaagccttatcgttttaaaatgacggatgtgaaaatgccggaactaaaggatggggaagcattggtccgcatcaaacggatcggaatatgcgggacggattttcacgcttattgcggaagacagccatttttctcttatccaagagtgctcggacacgaactgtccggtgaaattgtcagcatcgataattccggcggaacgctcaagccgggcgatcaagtgtcaattattccttatttggaatgcggggcatgcatcgcctgccggaacggacgccccaactgctgcgtcaatctgaacgtcctcggtgtccatacagacgggggaatgcgggaatacataaacgtcccggcagaccacctgctaaaaacagaaggattgacgctcagcgaagctgctgttgttgaatgtttaagcatcggcgcccacgctgcagaaagggcaaatatcaaaaaaggggaaacggtgcttgttgttggagcggggcccatcgggctcagcgtgatgaaattcgcaaaattgaagggtgcaaaagtcatcgcgatggatgtcagaaaagagcgcctcacatttagccgcagatgggctgaagccgatgaagtcgtattagggggagaacatgcggctgataagatcaaacggttgacgaacggcgactttccgacggctgtctttgatgcgacagggcaccctgcatcgatgaacagcgcttatcagtacgccgcacacgggggacggctgatctatgtcggacttgtcaacgaccatctggctatgcccgatcctgaaatccacatgcgggagctgacgattttatccagccgcaacgcattaagaagagattttgagacggtgatgaaagccatcatggatgacggagcggatgcgaaccggtttgtgaccggacagatggcgtttcacgatgttgttgacggatttcaatcagcgcttgctccggaaaccaatcctgtgaaagtgttgatccatctgtaagatcgcacgaaatgaaagcgttttctaaatttcggaaagaggggggttggccatgttttcaaacggccgcgggtttgtcatcgtgatgctttttttggcgggagtgattaattatttggatcgttcggcattgtctgtcgccgctccttttattcaggaagatttgaacatacgtccggcgcagatgggcatgctgttcagcagttttttcatcggatatgccgtctttaattttatcggcggctgggcatcagacaaatacggagcgaaacatacgctgtcggctgcaatggtcgtatggtcggttttcagcggcgctattgcactgacatataatttcgtttcactgtttatcatccgcgtcattttcggcatgggggaaggtccgctgtcagcggcaacgagcaagtcggtcaacaattggtttccgcaaaaagaaagggcaagagcgctcggcatgacaatgtgcggaacgccgctcggcggagccgtttcaggtccgatcgtcggattgatcgcgatccattgggggtggaaggcttcctttgtgttgatcatgatcatcgggcttgtttggacttgcttctggatgaaattcatgaaagataagccggctgattccggcagtttgtctcctgaaaaggaagcgcgtccgaaaaaggataccggcatcccgctgtctttttatttgaagcagccgaccgtgctgtttacggcgttcgcgttcttttcctacaactatattttgttctttttcttaacatggtttccgagctatttaacgacagcccgggggctgagcattcacgatatgagcgttgcaacgattataccgtgggttgtcggatttctcggtcttgcgcttgggggatttatttcagattatctgttcaagctgacgggcaaacagatgttttccagaaaagccgtgcttgtgtgctgccttttggctgcagcggtatgcattggatttgccgggcttgtcactaccgcgtttggagctgttgcacttgtcgcattatcggttttctttttgtatttgaccggcatcacatactgggcgattatacaggatatcgttcatccggacagggtcgggggcgtgagcggattcatgcattttcttgccaatacattcggcattatcggtccgacggttacagggtacatcgtcgagtacaccggagctttcacaagcgcctttttgcttgcgggagggctggcggtggcaggttctatttgcgtcgctttgtttgtgaaaccgatacgttctgaaaggctgcctcaatctgtaggagaaggcggacaggggcatcctttatgatgctcctgtagacatgaaaataacccccttctcagcagagaaggagggtgaaagtccaagcttcacggtttgttttttcttctgttcagcgttttaatgattttttcgcttcttcttctgagaagagaggtatagtctgacaggccaaattttgcgaaatcgacgtgtttgacttgttttttcagttttttcacagcatcacctaattcagcggtttagttgattggtttattgtatgtatgaaacgggaaaacggaataaggacgggagaattttcccgtcctcgttaagctttttttcttttatactcgccgatcagccgttcgttttgccggaaaatccgttcggtttgggggctgacttcgtatttcgcgatattggttttggattgccttttaaacattttaaaggcgaggcgcttttttacgctttcctggtcttgctgaaaagcaggctccatcagtcgtcaccttcctcttcgtttggtagcagaagatcatagatgcttgttaaagaagtaaacaggagataatcaaattctgtgacaaggtcttctgaggttaacttcatgacatagtcaaaatcgtggatggaaaaaggaatgaggaccatttttccgttttcttcataataaacgtctttgcggtcaagctttcttgaacatcgaaccggttttccatatgctcaagcaaatgatccttgctttcttctgaattatattcgcaaagtgcagcggatatattcattttttcggcaaaccgtttgatgagcttttcgatgccttctgcatacgcttctatatttccataatagatgtggatcggttcgtttttcaataggtattgaaacgttttcagcctgttttgatacgtgtggaggaggtcgttgttttcttcgagaagcattcttgtatctgtcgcgagttcagagctgccgagctttttaaagtaggcatttaagaaaataaaagcgtctgtcaacgtgaaaaaaacggcaacgatcaggtaatgaagcgggtttgtgaaaattgactgcggatcgtgcgtccaatatatcacggcgccgatgacataaagaaggtaccacgtttttctgatggcgaccgttttttcggcgagctgtttttcaaaacgccacacggcagctacgtacagagccagcgccaaaacaataagccaaacaaggaattgataaaatagcagcataacttgtttccctcttcccgagaaatagtgcagttcctatttctattgttatgccggctttcttttaaacatgaaaactcccgtcctagattcggacgggagtgtgctgattaaaagaataaatcaagtatgaaataggcaaatgcaccgatggttgccgaaatgggaagggtaatgacccaagtgatcagcatccgctttgcggtgccccagtttacgcctttcacccggtgggaagcgcccacgcctaaaatggatgaagaaatgacgtgtgtcgtgctgacaggcaaatggacgatcgtcgcgccaaagatgatgagggctcccgtcaaatctgcagagacaccgttgacgggacggatcttcatgatttttccgccgacggttttgatgattttccagccgccgacagatgttccgagtcccatggccatggcgcatgcaaactgcacccagaacgggatgtcggttgtactgtgcaagttacccgcgattaaagccatcgtaatgatacccatcgctttctgtgcatcgttcgtgccgtgcgtataggactgaatggcagctgtcgcgatttgaacgcgccgaaaccgcttattcgtttttgccagattgctgttcttaaaaatgactttgacgatgctgtagatcaaatatcctaaaacaaacgccaaaatgggcgataatataagtgcttcaataattttaataaatccgtggtatttaatcgcggcaaatccttccgatgcgatgacagctccggcaatcgctccgatgatcgcatgggatgagctgctgggaatcccgaaataccaggtcactaggttccatgtaatgccggcgataagagcggcaaggatcacgaccgatccgttttcaagcttgaaagggtcggcgatgtcgcttgtaattgttttggctacgcctgtgaacgtcatggcgccggcgaagttcatgacagcggccataataatggcatgccttggttttaacgcttttgtcgataccgaggtggcgatcgcatttgccgtatcatgaaagccgttgataaagtcaaatgccaaagcaaagatgacaatcaatatggttaatacaaataaaagatccattataatccctcgttacgcatttttcattatgatggtttctaaattgtttgctacactttggcatgaatctgcgatttcttcaagcgtctcatagatttctctgtactggatcactttaatcggatctgtctctttaccgaaaaggtttttcagcgatttgcggtgcaggttatcgcagttatgttcgtattctttaattttaatggcgtgcggctgaatttctttcaggcgattttccgccagcaattcgatcgtcaccagaatttcttttgcgcattctctgatatagccgctgaatttgtcaatatgctcatctgaagatgtgatcgagaatatttccatcatggctgaaaagtgctcgatgccgtcgagtacatcatcgaggctgtttgtaagctgaaggatgtcttcgcgttcaatcggcgtgataaatgctttgttcagctccttaatcatcgtatgtacatagttatctccttttgtctcatactcttttaaggtatccgcgaattctttaagggttgtctgattcgtcactttatagttaacaaaatactcagctgtttcatctaaattttttgcaatttccgtcaaaagcacggaaaacttgtctttttttcttttcaacatttgtaaccctccattgtttaaatgagacaatgcacacatcaaaatattatataactttttgtcgaaaaaaaacaggtgcagtcgaaaaaaacaattaattttcaaatcgtcataccttttagataggcgcaagcaccagctggcatccgggattttaagatgacaataggcgatttttcctttgatatcatcgttccaaaagaacggatctcaggatcgtttcgagaaatttgggagtttaggttcaaaaaaataagaaaattgggagttttttctttattttcagtcctctttcctgttatagtagtaataaactggaaaggaaggtgatctgatgagacggttagctttcttagttgttgcgttttgcttggcggttggttgctttttcagtccggtgtctaaagcagaaggagtcatgagcgggggaggtggtgataaagtcgccgtcgggaaagacggtatggtggctacggcccatccgcttgcatcaaaaatcggagccgaagttttgaaaaagggcgggaatgccattgatgcagctattgcgatccagtacgcactgaatgtaacagagccgatgatgtcgggaatcggcggcggcggcttcatgatggtctacgacggcgagacgaaggaaacgtcgatcatcaacagcagggagcgtgctccggagggagccaaacctgacatgtttttggatggagacggaaaggtgattcctttttcagaaaggtcgagacacggaaatgcggtcggtgtgccgggaacgctgaaagggcttgaagcagcgcataagaagtggggaacaaagaaaatggaagacttgatttcgccttctataaagcttgcagaggaagggttcccaatcgactcggttttggctgacgcgataaaggatcatcaggacaagctgagcaaaacggccgcaaaggatattttccttccggacggtgaacctttgaaagaaggcgatatcctcgtacaaaaggatttggccaagacgtttaaattgatacggaaagaagggtcaaaagccttttatgatggagaaatcggccgggcgattgcagatgtcgtgcaggatttcgggggttcgatgacacctgatgacctgtcccgctacgaggtcacaacagataagccgatctggggcgagtaccacggctatgatatcgcaagcatgcctcctccaagctcaggcggagtgttcatgctgcagatgctgaaattgattgatgattttcatttatcgcaatacgatccaaagtcgtttgaaaaatatcatctgctcgcggaaacgatgcatctctcctatgcggacagggctgcatatgcgggcgatccggaatttgtcgatgttccgctcagagggctgctcgatcccgattatattaaggagcggcaaaagctgatcagccttgattcgatgaaccgcgatgtgaaagagggcgatccgtggaaatatgaggaaggcgagccgaattatgagatcgtgcctcagcctgaagataaaacgatcggggagacgacgcattttaccgtcacggatcagtggggcaatgttgtctcttatacgacaacgattgaacagctttttggaacggggattttagtgcccgggtacggactgtttttaaacaatgaactgaccgattttgatgcggttccaggcggcgccaacgaggtgcagccgaataaaaggccgctttcaagcatgacgccgacgatcgtattcaaagatgaaaaaccggtgctgactgtcggttcccctggcggaacgacgatcattgcttccgttttccagacgatcttgaattattttgagtacggcatgagccttcaggatgcgattgaagagccgagaatctatacgaacagcctgacttcgtaccgctatgaatccggaatgccggaggatgtcagacgaaagctcaatgacttcggccacaaattcggcgcgaatccggttgatatcggcaatgtccaaagcattttcattgaccgggagaacaaaacgtttatgggggttgccgattcaagcagaaatggaacggcggtcggggtcaacattaagacatcggctaaatagcggagcaaggcttggtctaaagtttttagatcaagccttcttccgtctgtcagcgagcggggaaaagaggatttttttcgaaagaagagaaatatattttttgaaagcgtttactatttgatgaaggaggggtaccatgattcacacgttggcaaatggattttaccgcttttgcgagtgggtgatgcggctcgcctatttgaatctgctgtggatcggctttacgctggcgggagcggtcatcttcggtttagcgccggcgaccgccgcgatgttcgctgtgactagacagtggacgctgggaaaaacggatgtcccggtgtttcagacgttttttcgggcgtttaaaaagaaatgggccaaatcaagcgttctcggtttgatattgggtctggtcggcttattgctgtttgttgattttcagattgcggccgtctattttcacgatcagccagtgtttttaagcctgttcatcagtttgtttatcatttatgccatcatcctcttatacgctttttcaattgatgtccactacgatttaaaacggattgcagtgctgaaatacagcttcatcatcggcttttcccgtccgctcacctcgtttttcatgctgatcagcgcgtttggcatgattctgctcgctttatttcatgtcacatttcttctgtttttcagcggcagcgctttaagcttcattttgacgaagctttcgtttcaggcattccgtgcaatcgacgggcgccggacagacaagcaggctgccgccccacgcttgaaatgaaggtgttcgttcggtgaaccggtatcagcatttaaaaattaaagatcaattgtttattttgatttcactgatcatggccgtttcgctcatcctgatcttgagcggcattcaatacgcgttccgggtatatgaccagcagatttacaggaagtcgtcacaggtgctgatgctatcatcaaaaagcattgaagatgaattgaaaaagattgaggatgtgtcatatcaaatcaccactgacgcagacatccaagcgaacctcctgaaagccggccgcggccagaacaaatacggacgctaccggataaaaagcaaaatttgggataagctggccgaatataccggctctaagcggtacattaaatcgattcatttgtttgatgcttccggcaccgagtactccgcaggggcgaatttaaccgaagcattgcgggagcaaaagaatgcgctgatcgaaagagcgtcgcgccaaaaaggcagcaacatgtgggagcccatgccgggtgaaaccggcgagctgttatccgtccgggaaatccgctcctatgagcgtttaaaccttgaccacctgggaacagtggtgattgtcgccgatttaaaacgggtgatcggcgatcttccgaaagactggggggaaggcgcgggcaagattgcgatgtcggacggacgggagctgtttttttctgaaatgcttttcagccaaaccgatggcctccgattgtcttctcatgctgaaaacggatatgacattgtggaggaaaacggccagcggtttttcgtttcatatgtcaaatcagcgtataagaattggacgtattggagcctgatcccctttgacgctatgttttcgaaaatttctgcgatgaagacgatcctgatttccctttttatcctcttttttctgattgctgttctctttggaagaaaaatggccaggggcattacgagcccgattgagaagctggtggcggccatgaaaaatgtccaaaacggcgattttaaactggcgccgctcactcgcgctcctttagaccggcaggatgaagtcagcgtcttaaaccgcaacttctttacaatggttgaacggatcaatgaactgattgccgagaactacaagaagcagctgatgctgaaggagacggaattcaaagcgcttcaagcgcaaatcaacccccattttttatacaacacgctcgagtcgatcaactggcttgcaaaaacgaaccggcagccgcaaatttcaaagatgacggaatctctagggtttttgctcagaaatgccatcaatatgaaaaccgacgtgctgacgatcgaggaagaagttgaaatcgtgcgccactattttacgattcagcggtttcgctttgaggagcggctcgtttttgagctcgacattgagccggctgtgaaaaaatgccgcgtacctaagcttgttctccagcctttggctgaaaacgcgattacatattgccttgagcccttcattgaaccttgccatattcaaatcaaagcatataaaaaagaagagcttgtctatttaacggttgccgacaacggccccggcatggatgaagactttttggaaaaggcgagaaaggagcttgtccggacaaccgggagaggaatcgggctgcaaaatatcgacgagcgcattcagctgatgtttggcaaagggtatggcttgacgatttcaagcgaaaagaataagggaaccgtgatgatgattaaaataccatttcaaagcggggtgtgatgatgtataaagtgctgttggcggacgatgaacggattattcttgacggcatctccagcatgatcgagtggaattcgttcgggacgtctttgatcggggccgcacagaacgggattgatgcttaccgcctgattatggaaaagcggccggacattgtgatcagcgatattaaaatgcctgggatgggagggctcgaactgatcgaaaaagtgtcccgcgaccacccgtcaatccggtttattttgctgacgggcttcggccagtttgaatatgcaaaaaaagcgatgtcatacggagtcaggcattatttgctcaaaccctgcaatgagagccatattacagattcgcttcaaagcgtgatcggcgagctgaaaaaagaggaatcggcgcaaaaagtgaaaaccgatctggagatgatgaagccgcatcttatgaagcagatgttaaaagagctgatcaccggcggccgcatcgaggatgaagcgtgcctgcgctttttttcagagcaaaaggccatcaggctgatcctgttttccgtccgggacggggaggataaagattatgcacaaggcgttgaatccattgcggatgaggtgctgaacggtgctgtcatcgcctcggcccgggttcagcaattgcttgtctgtgcagtagacggaacattggcttctgctgtgcttgaggaaaaaatgaaaagcgtccaagagctttcacgccgcctgctccgatttgaaccagaagcatcactcagcgaaagcggcaatatcagcgaagcctccgagatgtacgaaaaggcatatagaaaaatcgtccaagatgatggggggacatcggttttaatcggaagggtgcttgatctcatcgaaaaggaggcctcaaacccgaagctttcgctaaagtgggcagcccgcaacatgctgtatatgaatccggattatctcggcaagctgtttaaacaggaaaccggtgagaagttttcaagctatgtcgcaaaggtgcgcatcgaaaaagcgatcgcgaagatgaagaagtctaaaaacacggccatcggcacgctggcagaggaactggggtttggccacaatccaaaatacttcagccttgtctttaaaaaatacacgggactcaccccgtcagaatttcgaaaaaaagaagacaacacgttttaatgccgccgggtttatccggcggttttttgcgcattgacggaatctctgtttttttaacattcttctctgttttttgagtttctgggacagaaagctgaatttaaaatgaaatgtaagcacttacaaattggggagggggaatgttgatgagaagatttgtttttgtctctttgtgcattttgctgacgctcggcctgttcggatgcagttcaaacactgaagaggcggccggtgcggacggcaaaaagaaggttaccttaagggtcgcatggtggggcggacagcctcggcatgattatacatcaaaaatcattgagctatatgaaaaggaacatccgcatgtcaaaatcgaagcggagtttgcgaattgggacgattattggaaaaagcttgccccgatgtccgcggcagggcagctgcccgatgtgattcaaatggatatggcgtatttatcccaatacggcaagaaaggccagcttgaagatctgactccgtatgtcaaagacgggacgatcaacaccgaatcgattgatgaaaagacgatcaaaggcggaaaaatcggtgatcagctatacggcttcccgctcggtgtgaatgtactgtcggtgattaccaatgacgacttgctaaaagaagcgggcgtcgagattgacgatggcagctggacgtggaccgattttgaaaacctggcgctagaggtcgaagagaagacgggacaatacggttcaaacggcatgcatccgcccgatgtctttttcccgtactacctcaggacaaagggcgagcgcttctataaagaggacggcacaggccttgcttattcagacgacaagctgtttgtcgattacttcaagcggcaggtgaagctcgtcgatgaaaaagcttcgccgacgcctgatgaaagcgcgcaggtgaaggggatggaagacgattttatcgtcaaaggccgaaccgctgcaacatggaattattcaaatcagtttgcggcgttcgcgcagcttaccgatgcgcccctgtcattaaagctgcctcctgaacaggcgaaggaaaaggcgctgtttttaaggccgagcatgctgttttcaattccgaaaagctccgaacagaaaaaagaagcggctgcatttatcgacttctttattaacaatgaaaaagccaatgccctgatcaaaggagaaagaggcgtaccggtctcctccaaaatagcggaaacagtgaagtcagaactgagcgaagaggagaaaaagattttcgaatatgtcgaaagggctacagcgtacgcgggagaagcggaaccgcctgagccaatcggcagcgccgaagtcatcaagctgctaaaagacacgtcagaccaaattttgtttaaaaagatcacgcctgaagaaggagccgcgaagttcagaaaagaagcggacgccatactgaaaagaaatcaacaatgataagcggggcaagtggaggaaggccgctcatcaaatccaggaggaagtgaacgtgaagcgaaaaaaaagaattgacaatttggcgggttatgcctttatttccccgtttattatcggatttttgtgctttaccgtcattccgatgggagcctcgctgtttctgtcttttacaagctacgatctgttcaccccgcccaaatgggtcggctttgacaactataaggcgatgctgaccgatgatgaaaaatactggggttcgctgaaagttacgttttattacgtgctcgccggtgtgccgctgcgcctcgcgtttgcgcttttcatcgcggtgattttgaacagagccgaaaagggtgtgggcatttaccggacgctcttttatctcccgtccatcatcggcggcagcgtggcggttgcgattatgtggcgcaatgtatttggcaatgacggtgtcatcaatgcgcttttgttcttccttggttttgacaagaagattttttggtatcaggacccgacaagcgcattgtggaccttgattcttttgtctgtgtggcagttcggctcttccatgctgatctttcttgccggattgaaaaatattccgccgatgtatcaggaagcggcaagcgttgatggtgcaaacaggtttcagcggttttttctcattacgctcccgcttctcagcccgatcatcttttttaatttggtgatgcagaccatttcagccttcatgacctttacgccggcctacattatttcaaaaggggaaggcggtccgcttgacgggacgcttctgtattccctctatttgttccagcgggcgttcaactttttccaaatgggctacgcttcggctatggcatgggtgatgctgatcctgatcggccttgtcacattcatattgttcaaaacttcatccttatgggtgcattacgaatcgaaggaggggtagctggtgaagccggtaaaagatatttcgtggcgggccgcgcctgccccgcttcctgcgggaaatagaaagaaaagagccgggcgtctcgtgtttcatatcacgacggccggtcttgcgatcatccttttgtatcccgttatctggctgatcgcaagctcgtttaaagaaagtgcgagcatattcgccacatcccactcgctcattccggaccccttgatcctgtccaattatacggagggctggaaagggatcgccggacagccgttcatcacattcattaaaaattcgcttatcattgtcggcctttcgacggccggcgcggtcttgtcctcggcgttcatcgcttacggattcgcgcggattccgtttaaggggaaggcgttttggtttagctgcatgatggtgacgatgatgctgccgcacgaggtgctgatgattccgcagtacatcatttttgcaaagctggattggctgaattcattcaagccgatcgttgttccccaatttttcgggcacgcgttttttatctttctgatgattcagttcatcaggacgatcccggtagaactcgatgaagcggcaaagattgacggctgcagccgtctcggcatctttttcagaattattttgccattgatcgcaccggcgctcgcgacgtccgccatcttctcgttttactggaagtgggaggaactgatcaatccgcttctttacttgaacaagccggagctttacccggtttctctggcattaaagctgtttttagatacggaaacggcgtctaactggggggcgatgtttgcgatgtcagtcgtctcactcgtcccggtgatcctcgtgtttttcgtttttcaaaaatcgatcgtccaaggaatcagcatgagcggattaaaataaaaaggagagaagagtgcatgacaaagcttgtttttgatgaagaaaaactcaatgaagtgatcgacagaatcgttaagcggacatttgagatggatttcgaatgggattggccgggcggcgtcgcgttttacggcgtggctgaggcgtatgaagcaaccgaaaatgacgaatacctcgagcttttgaaaaactggacggatgaaaagcttgaagacggcttgcctaagctgtcgatcaacggagtatccatcggccataccctcatatcgctctaccaggcgacaggagatgaccgttatctggacgccgcccggcaaatggcggactatgtgctccacgaagcgcctcggttcgcagacggggttttgcagcacaccgtcaactcagagaaacatgtattccctgaacaggcatgggtcgatacgatgatgatggcgggcttgttccttctccgaatcggaaagcttgtcggcagcgaggaatattttgaagacgggctgcgccagtatcacggccatgaagaatttttgcaggatatggagaccaatctttattatcacgcatgggaccatgtggccaaaaacaacctgtcaggcatattttggggaaggggaaacggatgggcagctttaacgatggcaaaagcgctccctttaatcgatgttacgcatccgtcttatatgatcattgacggttcgctccgggacttgctgagcgcgcttgtcaggcttcagcatccctcaggtttatggcacaccgtactgacggacccggattcataccttgaagtgtcaggctctgccgggattgcatccggtttgctgtcaagaggctcgctataccacaaatccgttcagaaggcgctctcagccattacggatgcggtcgcgcctgacggaagggtggagcgcgtttctgcgggtacagcagtgatgcgggatgcgcagggttacaaagacgttccgtataaacggattcaaggctggggacaggggcttgccctgacctttttggcagatgtcgtccgctccaagtcgcgcgcgttccaatagaaattgaaaaaagaaacattcttttcattgcagtggggggaaaagggatgaaaaagctgcatcaaagatatgtttcacggcgtaaagggaggttttttaaaaaaagctttgtgatgatcctgctgattgcgtgtattcccggcttattgacgggtgcaggagtctatttgttttcggctgcgaaaattgaaaaagagctccaacatctgcacgagaaccaggtgaaacgccaaatcagccaaatcgatgacaagctggaagggcttgagatcatgctctcccagcttgcatatgatccgcgcctgatgaacggtctggccgatgccgatctgcaaacggattttcaaacgacgtacaagctctcaaaatcgctgtttttgcttcaggatcaaaatccgctcattcacaaggttgaactgttcattcaagggaaggagccgattctcttaaatccagaatacagcggactgaccgaccggaaaatcttgaaggcttatcattcgctgcttgaaggcggtcaaaacgtctattggaaagacatgagcggcgcttcatccggaatggcccttgtccataaaattccgggaggcatctcagaaccgttcggcgcgctgattttgacgcttgacgaaagagaattgggccggttgcttgagagcctttcgccgtattcaaagggaacagcgctcctttttcatcataatcagaagcctgtttcttggagcaatcgcggcaaaaccaactttgaaagcgccttaaaagaaaggcttgagaaacaaaaaaatccacagggctcctttgttatggattggagcggaggtgcgtattccgtttcatacggacgaatggacagattgaaccaggaatggacctatgtttcggcttcaccgatgtcggccattacggctccggtgctgtttttatcgaagctcatcgcgtcggtcagcatcgccgggatcgttcttgccttcattctggcatggtatgcgtcacacaaaatttattcacctgtcgcaaggctgatcaagctctgctccggagagggaaaggcggcctattttccggatgaatttcattggctcgagaagcgctgggaagacctatctgaggaaagcggcagactgaaaaaggaactgccccatgctgcaaacgttttttttcagcgccttctgagcggatactttgcagatgaatcagagaggaatttgagagatcgtctgaaaaggtggggctgggaagcaaaagacaatgtgtttaccatcatcgatgtccagctgacgggactctacgaaggaaacggatcttttacaaaaaaggatgaaagtctggcgggctttctgttgggaaacattacgcgcgaactggctggaaggacattcaaccatatttatatgacagatgtccgttcgctatcgcttgcggtgctgctggcgagcggccggaatacagccttcaaggaagaaatcgcccaatttgtgcgtgagctgacagatgtgatctacagcatatccaaactgcacgtcacagtgacggtatcaaaaaccgctgacaagttaaaagacactcccggcatttatgaagaggtgaaagaaggcaggcattacagacagttcgaaaacgccagccaggtgatcgatttaagccggcgggaagacatgcctcccgctgaatcatactatccgttcgctcttgaaaaagaggtagtcagggcgttgcggcttgaagaaagggatgaagtcgaaagaaggatcaggctgtttatccgggagctgtccgaaaaaggaaaaacggaaatccgcatccagccgggcatgatgcagctgttcgcaaagatccaagaagagatctttcattccggccttcacccctatgaattgttcagccgaaaaaacctgcttcaggagctttcggagctgagggagccggaaagggctgtcggctggatgatggagcgttgcataagcccttatcttaaagagatggaaggaaggaaaaacagacagcaaaaacggcttgtcgaacaggtgcttgagatgattcatcaggattatatgaacgatatctcgcttgaaagctgcgctgatcgggccgggacgaattcgtataccctgagcaaagctttcaaacaagtaaccggcatcaattttatcgactatgttacccggctcagaatcgaaaaagcgaaagagctgcttcttgagacgaataaaaaaatccatgacgtttctgaagaggtcggctacagacacagctatttcaaccggattttcaagaagcaggtcggcattccgccgagccgctacaggcagattcatcaggaatcttcgtgaaagggagagtgctatgaaacgaacagacaaaaaaccgaaagtgacagtatatttggccggggactcgaccgtcgcagactgtcccccgcatgaagcgccgatggccggctgggggcagatgcttccgctgtttttctcagatgaggctgcggtcgtgaatatggcaaaaggcggggccagttcgaacagcttcattgatgaaggccggctcgatgacattacggagcggcttgcgcctggtgattatgtgttgatccagttcggccacaacgatcaaaaaccgtacggaacagacccttatacaacctatcaggagcatcttgtccgctatgtggaagcggttcacgaaaaacaagcgacaccggttttgatcacttccgcagagcgcagacgttttgatcaaaacggaaagcccgccgacacactcggggattttccgaaagcgatgaaggcgctcgctgacagcttcgacgttccgctgatcgatttatggtccaaaacaaaagcgctctatgaatctctcggaatcgaaggttcaaaacggctgtttgtccactttcagcctcatgagcaccctcattatccaaatggaatcgaagacaatacccatttttccgaagcaggggcccgtcaagtcgccaggctggtgacagaaggaatcagagagcttggtctgcctctatcggcttatctgctttgtgaaaggagcgatttccgtgccggagtgtaatggaagagaaggaagcctgatttatcaaaaccctttatcttctcctgaagatctccgcggctgggtgatggaagggaaaggaatcgttcgttttcagaacggccgcctgcatatggagaacgaacttgacgctgagcaatatggggacgatgctcattttgtttactggtgccctgagacattccctgatggaattgttgtgaagtgggatttctaccctgtgcgggagcctggcttatgcatgatattttttgcagccgccggcatgaatggcgaagatttatttgacgggcggctggcggagaggacggggaaatatccgcaatatcattccggggacatcaacacattgcacctgtcgtatttcagacataagcatgctgatgaaagagcattccgaacatgcaacctcaggaaaagccgcggctttcacctcgtctgtgaaggagccgatccgcttccgcccgctgcagacgctttgcctccctaccggatgaagctcataaaggacggggcatacgttcgtttttcaatcaacgagctgcccattttggaatggacggatgacggcaggcgtttcggccctgtttacggcgcaggaaagatcggcttcagacaaatggctccgctggaagcagcctacgccaactttgaagtgcgcaggctgctgcgcggctgaaaggaggagcggacatgcgggataaaggcgtaatggcgatgatgtacggcgcgtgtgaagcgatcatgaaaatcgcctggctgaacgggatctgggttttattcacgctgggaggaggcattgttttcggctgggcgccgagcacggctgcgatgttcacggtcgtgcgcaagtggctgctcggccggacggacgcaccgctgttcaaaacgttttatcaaacgtataaaaaagagtttttcaaagcaaacggacttgggctcatcctcattaccgccggaacaattttattcgtaaactatcaatttttccgcgtccgtgcggatttattttcgatcatgatcagctatgccacactggtggccgggctcatctatctcgtggttttcatttatatttttccgctttacgttcatgttcagctgccgtttgtccgctatttttcacaggctgcgctgatcggtctcgttcgccctttgacgacggccggaatggctgctgctggttgcttggtcgtgtatgtgctgttgacggttccgggtctgatcccattttatggtgtcagtttgtttgctcttgtatcgatgtttatcgcacatcgctgttttttgcgtctggaaggctagctgaactgtgcaaaaatgagaaaatcgggcaaaaaaatatcaattggaaaggctgaaccgcttaagaccggacttgaacacatcttttcccttcggcaaaaaagtgcaattgaataaaaatggaagccgtaatagaatcccttttgagtaagcgcttacaaaaatggtgaagggagaagatgatgaaaaaaggaaagaaaaggtggaagaacctgttggccgcgtcatctcttttattaatcacgctagtgaccggcttctcggagcaagctgaggcagacgggcggacggctgcgcaggcaaggcaaatggaatcgcttaacagggggcttgtcgctgttaaaacggggaacggtgtctttgtcagctggcggcttctgggaaccgagccgtcttctgtttcatttaatgtgtatcgaaacggaaagaagctgaacggttctccgattacatcgagcacaaactatcaggatgcaggcggggatttgaacgccgtttaccaggtgcgcgccgttttgaacggcagggagcaggctccttctgaatccgtcggcgtattgaataaacaatataaatctgttccgctgcaaaaaccggccggaggaaaaacgcctgatggggtgtcatacacatacagcgccaatgatgcgagcgtaggcgaccttgatggagacggccaatatgaaatcattctcaagtgggatccttccaattcaaaggataattcacaggacggatacacgggagatgtgctgattgacgcatacaagcttgacggcaccatgatgtggagaatcaaccttggcaaaaatattcgcgccggcgcccattatacgcagtttctcgtctatgactttgacggcgatggaaaagcggaaatcgccatgaagacggcagacgggacgaaggacggcaaagggaaggtgatcggcaatgcaaacgccgattaccgcaatgcccaaggccgaattttgtcagggcctgagtatttgacggtttttaaaggcgatacaggcgctgagcttacaacggtcaactacgaacctgcccggggaaatgtagccgattggggagacagctacggcaacagggttgaccgctttctggccggtgtcgcataccttgacggggagcggccgagttttgtcatggcacgcggttattacacgagaacagtgctagtcgcttacaacttcagaggcggaaagctgaccaagctgtggacgttcgattcggatgctcccggaaatggcgcctatgccggtcaaggcaaccacagtttgagcgtcgccgacgttgacggagatggaaaggacgagatcatatacggagcgatggctgtcgatcatgacggaaaaggcctctactcaaccggctggggacatggggatgccatgcatacagggaacctggacccgtcaaggcctggactggaagtcttccaagtccatgaaaacagcaattctccttatggcttgtccttccgcgatgcgaaaacaggaaagatcatctggggagttcacgcaggtaaagatgtcggacgcggaatggccgctgatatcgatccgcgctacgaaggagcggaagtatgggcgaacggcagtctttatacggcaaaaggcgtaaaaatcggaaacacattgccttcatcaacgaacttcggcatctggtgggacggcgatctccaaagagagcttctggacagcaacagaattgataaatgggattatcaaaattcgcgaaccgtcaacttgctgacagcgtccggagcttcggcaaataacggaacaaaagcgacgccgtccctgcaggcggacattctcggagactggcgcgaagaagtggtctggcgagcggaggacagcagcgaactgcgcatctacacgacgacagacgtgacggagcaccgcatgtatacgctgatgcatgatgcagtctatcgcctcggtatcgcctggcagaatgtcggctacaaccagcctccgcacaccggcttttatttaggcgaaggcatgcagacaccggagaagccgaacatttatacacgctgatgataaaggggagctgcataatgaagcgatatgttcgctgcttatgggtcatccccctccttttctttttcatcatgggaatgggggacctgcgcagccgaaagccgctgccgcgcatcacagtcaggatctttttctgttcgattttggaaaaggtcccgctgagaaggattatgtgaaagtgaacgagtcctccgtgtatcaaaatggtgctggctacggattttctcaggcaggaagcgctgtgtgcaaaaagacgcaaaaaaaagaagcgctcaaaaaagactattgtatcgtgaaccggacggcttttctggcagatctctcccccggcaaataccgcgtgaccgtttttgcatcatccagcggtgaattgaagctttatgccgaaggagaaaaaatggggacgatcccggccggagcaaagggaagctcagccgaaaaagcgttcaccgtttcggtggaagacgggcgcctcgatctggagtgaaggggcctcagccaaaggtgtatgccatcgaaatttcgaggtgtatcagttcgatttcggtgacgggcctcttgcttcgggttttattccggtaggcgctgcttcggcctatacccctctaaaaggctacggatttgacgacgcggcaaaggtgtcctgcacggaccgaggtacggccgacccgcttcgttcagacttctgcattccggatgggacggcgtttactgtcgatttgcctgacggtcaatatcaagtccaaatcataaccggagatgcgcgggcaaagacgaacatggacgtacgggcaaacggcatgctccagctgtattcgtttggagcggaagcgggcggatacaacgaaaaaacgtttccgattcatatttccggcggccatctttcgatccaagccttaacggcgagaacaatgccgcgccttaatgcgttggtcattacgaagacggcttatcatgtgacggatgacaacacgacggtctttctggcgggcgattccacggtctccgattatgagcccggctatgcgccgatggcaggctgggggcaatttttaggcggctatttctcggatgaaatcgtcatcgacaaccaggcgaaacgcgcgagaagcgcgaaaagttttgtggatgaacggtcgctggctacgattttgaaccggatgaaacggggcgactatttgttgattcagttcggcattaatgacgcagggcaagatcctgcccgccatacagatccgtatacgacatttcaggaatacttgagaacatatattaacaaagcccgcgaaaaaggaggacgtcatgtgctcgtcacttctcaaagcaaacgtacctatgatgaaaagggcgttttctacaacagcatcggagaatatccgaacgcaatgagacagctgggacgggaaatgaacgttccggtgatcgatttaaacaaaaaaagcattgaatattacaacgagatcggcgttgaagcgactaaaaacgtatttatgtttctggaaccgggagaaagcccgaattatccggaaggcatccaggacagggtgcattttcacgagttcggcgccaaccaattggcaaggctcgtcacaggagaaatctccgatttgaatatatatccgctgaaacactcgctcaagaaataaggtgtcgggagatccggtctccggctctcccgttcgccattccaaaccgcaaagggggagagaggactatgggagaaaaggacagacatgcagcagctgatcgcgttcgtccggtgaaaacggcggcaaaaccgaagcaaatggaacacttaaaccgcggccttgtggcggtaaaaacaaaaaagggggtttttctcagctggcggctcttaggaaccgatccggaagaaaccgcttttaatctataccgcaacggacaaagaatcaattcaacacccatttcatcatcgaccaactttcttgataaacacggaaatggaaaatcgctttattatgtgtccaaggttctcggagataaggaagtcgagacgtcgcccaaaacagctgtctggcagaagccttacttggaagttccgttaaacaagcctgacggcgggacaactcctgacggcgcaccgtatacgtacagtgcaaatgacgcgagcatcggagatctcgacggcgatggagaatacgaaattgtgctcaaatgggacccgtcaaattcgaaagataacgcgcacaacggctataccggagaagtcatcatcgatgcctataagcttgacgggacattcatgtggaggattcatctcgggaagaacatccgcgcgggcgcccattatacccaattgatggtctatgatcttgacggcgacgggaaagcggaaattgctatgaagacggctgacggaacagttgacggaaccggccgggtgatcggcgatcaggctgccgattacagaaatgaagatgggcgaattctggccggccctgaatatttgtcgatttttcacggggaaacgggaagggaattggcaaccgtggattacgatccgccgcgcggaaggcttgaggactggggagatggatacggcaaccgcatggatcggtttttggcaggcatcgcctatttggacggcgaaaggccgagccttgtcatggcccgcggctattacacaagaacggtgctagtcgcttacaacttccgagacggcaagctgaccaagctgtggacgtttgacagcgacaagcccggaaatgaaggctatgccgggcagggaaaccatagtctgagcgtcgctgatgtcgacggtgacgggaaagatgagatcatctacggcgcgatggccgttgatcatgacggaacagggctttatacgacagggcttggacacggtgatgccatgcacgtgagcgatcttgacccggaccggccggggctggaagtctttcaggtgcatgaagatccgcgccttccgtacggcctctcatttcgcgatgcgggtacaggggaaattctctggggagtgccggccgatacagatgttgggcggggaatagccgcgcatatcgatccccgctataaaggagcgcttgtctgggcgatcgatccaccgggcaatgaaggaaaatcgtacggcctctatatgagtaagggagaaaagctcagcgatgccgctccggcttcggccaattttgcgatttggtgggacggcgatcttctccgcgagctgcttgaccacgattggaaagaacccgcaggcatccccaaaattgataaatgggactatcacagcggcaggctggtcaatctgctcaccgctgacggaacgctgtctaacaattggacgaaagggacgccagtgcttcaggccaatttgttcggcgattggcgcgaagatgtcgtgttccgcacagtccgaagcgatgctctgcgaatttacacaacgaccgagccgactgaacaccgtttctatacgttcatgcacgatcccgtctaccgcctgggggtagcctggcaaaatgtcgcttacaatcagccgcctcatcccgggttttatgtgggaaccggaatggacaagccgccccggccgaatatttataccgttccttgtaagagaaatgaagaatgaaagagaacggcggttcagcatgcgctgggcccggggcaccggcagaaatattcaacttacaaaaaagtatgattgtaatcttacagcctgttccataaaatgattggtaagcattttcattacaaaatgaaaagagggatccatatggggtatcaggcgagtgatgtacgctatgaaaatatgaaatacaacctctgcgggcattcaggattaaaactgcctgctttgtctttagggctttggcacaatttcggagaagcggcttccttgcaaaatgccaaagcgctgttaagaaaagcatttgacctgggtatcacccactttgacttggcgaataattacggtccgccgcccggttctgccgaagaaacattcggaaaagcgctgaaaaccgattttgccggctaccgcgatgaaatggtcatcagcacgaaagccggctatacgatgtggcccggaccatacggcgattggggatcaaaaaagtatctcgtggcgagccttgatcaaagtttaaaacgaatgggcatcgattatgtcgatatattttattcacaccgccctgacccccatacaccgctggaagagacgatgggagcgctcgcccacatcgtcaggcaaggaaaagctttatatgtcggtttgtcgaactacagtgctgaacagaccgaaaaggcggctgatattttgcaagaatacgggattccgctcctcatccatcagcccaaatattcaatgttccacagagaaccggaaaaaggcctgctgcaagtgctgcagaaaaaaggagccggggcgatcgcgtttacacctcttgcccaagggcttttaacaacgaaatatttgacagggattcccgccgggtcaagagccgctgatgcgaacagtccgtttttgcaggccgagggcatcacagaagacgtgctcggcaaggtccgcaagctgaatcaagtggctgccgaacgcggccagtctcttccgcaaatggcgatagcctggctattaaaagacccgcgcgtcacctcggtgctgatcggcgcgagcaaaaccgaacagatcgaagaaaatgccgcggcgcttaagtccgctcgattctcagctgaagaactcgacacaattgataaaattctttcataaataaggagtggtcgtgatgacaatcagcatctatttggccggcgattcgaccgtgcagcattataaggctgattcgcctcagggaggctggggcgaatttctccagtcttatttatccggaaatgtacaggtgatcaaccgggcaatcgggggccggagttcaaaaacgttcgttgaagaaggaagacttgcatctattttggatgtgatcaaacaggatgattggctgttcgttcagatggggcacaatgatgcgtcgaaagacaaaccagaacgctatacagagccgtatacgacgtataaacaatacttgaaaatgtacgttgacggcgcgcgtcaaaaaggggcatcgccgcttctcatcacacctgtcgcaaggctccattacaaagacggcgtctttttaaacgatttcccggactactgcattgcgatgaagcaggtcgcaagcgaagaaaacgtccgcttgatcgatttaatggacaaaagccttcagcattttgcggaaaaaggatacaacgaagtatttaaatattttatgatctcggaaaatgtcaacgactatacacattttacgaaaaaaggggcccgggaaatggcgaagctcgtctcggagggcattcgagagcttgggctgccgtttgtcaaagagacggtatgaagatgaacggaaagctgtaccatggcgcttgcttttatcccgaattgtgggatgaggatgtgctggatgaagatatcaggatgatggagcgaatcgggatcaatgttgtcagaatcggggagtttgcctggtcaaggatggagcctgaaaaaggaaggatcgatgtcggattttttgcagacgtcatccgaaagctccgcgacaacaaaattgaaacggtcatgtgcacgccgactgcgacgccgccgatctggctgacccacgggcacccggaaagaatgcatgtgaatgaaaaaggggagacgatgggacacggttcgaggcagcatgcctgcacaaaccatccctatttcagagagcgggcccggctgatcatcaaacatatcgccaaagagatcggagaactgccgggattgatcggatggcagcttgacaatgaattcaaatgccatgtcgcagaatgcatatgtgaaacgtgccgcacattatggcacaaatggctggaagaccgctatcagacgattgaccgtctgaatgaggcatggggtacgggcgtatggagcgaaacgtatcagtgcttcgagcaagtcccgcagcccggaccgaccccgtttttgcataattcttctttaaggacaatgtatcagctgttttcgatggacaagatttctgaatttgcgcgtgaacaggctgaggtgatcagagcatactccgatgccccgatcacccataatagcagcgtcatgttcggcgttgatcatgaagaccttttcaagagccttgattttgcctcgtttgatacgtacgccagccaggaaaacagtcaagcctttttgtttaattgtgatttatggagaaacatcaaaaaaggacggccgttttggattatggagacgagcccttcctacagcgcttcgcttgaaagctatgcggcgcctcatcaaaacggctatttgaaagctgaagcggtttcttcttatgctcttggcggagccgcgttctgctattggctgtggcgccagcagagagccgggtctgaacagccgcacggatcagtgctcagcgcatggggggagcctgatgtgggatatgaaaatgtgctcgaagccgggcgggcaagacgagaggttgaacacatcatgctggctacggctcctttgcaggctgaaacagctgtcgtctattcggaccgtgcgaaggtgtttttgaaaacggagcctcatcggggtcttcattacagaacgctgatcaccgagttttatgaccgattattaaagatgggcattcacagggatgtcattcttgaagggagcccgctggacggctacaaactgctgtttacgccgtttattcattatcttccccctgcttttatcaaaaaagccgaagcatttgcacaaagcggcggcatttggattgcgggtccgctgacgggcggaagaacagagcaccatacgattcacactgattgcggattggggcctttagaaaaatgttctggtgttaaaacgctgtttacattcccgatggatgagcggaactcaagcggaacggcgtttggcgtaaaggcgccgctgagcttgtggagcgctgtttttgaagccggcggcaccaaggctgtcgggatgattgagaaaggcccggcgtcaggcaaagcgttcatcacggaacacaaatgcggaaaaggcaaaatcgtcatgctcgggtcgatgccggcaggcgaagcgggggacatcatgatgaaaaagctgatcagccattatgccgaagaagcgggcgttgagcagaaaaccgatgtcactcccggaacagtcgtcgcgccccggaaaggagcagacggtcttgtctgggtcgtgatcaatatggacggcaaaggaggcgcagtgacacttgacggcaacggaaccgatcttttatccggcaggcccgtaaccggacgcgtaacactcggcccgcacgactaccgcgtgattttgttatcagagaataaatgaatcgccgcaggctcttgcccgcggcttttttggtttgttttgcaaaaaacgatgattcctgcaaaaaaggagttggcatcccgctatcataagcaaaaaaggaatattgacggtcaataggctaaacaggaaaatattcactgaccaatcggttgaacagaaaggaggaacgcttgtgaaagcacaggctgaactaaaatggctgaatagagcgcctgcttcgttcggcggggtgacttggggagtgccttgggcaaaaggagtgctgcaaaaaggggagacggccgtcatcgcttcggaaaacgccccgcatttgcaaacatggccgcttgcatattggcctgacggctcgattaaatggacgggccatgccgcagtattcccagaagaaagcggacgccgatttacattgcaaaaaggaaagcccagcgcgccgaaaaccgtcgtccgtgtcagcgagcagaaagacgaaatcacggtgaatacgggcgcgatagtctgcaagctcggaaagtcggggccggcactgatccgttcgatttccatttccggggaaatgatggcgaaagaaggacggctcatcgctttaaaagaaaaaagaagcggttcagatacacaaagcatgtattatattgaacggtttgagagcttggtcaaacgtgcggcaatcgaacaaaacggtccggtcaagacagtcatcaagattgaaggcgtccaccgcggcggaggcatcgatgtttggctcccttttaccgtcaggctttctttctatgccggtgtcccgtccatccggatcgtgcacacgatcttcatcgactgtaacgcagaaacggaatggatcaaaggactcggtttagagatgagcgcggttttgagcggagcgccaagaaacaggcatattcgctatgcagccgacggaggaatttacggagaggcttctcagctgcttgtgacgagaagatttaatgaaacaaacgggttctatgaacgacagatagccggacagcctgtcccggaagagtcggaagtcgtgcgtgatgcagagaaaaacgccgtctggaacgatttcaagctcattcaggattcccctgttcactggcgcttaaaaaagcgaaccggcaaagactgcgcctgggtggacgcgattcatggggggagagcgaaagggctgatgtatgcaggcggggaaaatggcggcatcgcgctcggcctcagaaacttctttgaaaaatatccatcatcgctcgaagcgcaaggtcttgccagcggcgaaacaaaattgacggcatggttctggccccctgaagctgaagcgatggacttccgccattattcaaaaggcactcacgttgaaagcgcatatgaagggtttgccgaaatgaggtcgacggctgtcggcattgccaatacgagcgaagtcaacctcgcctgtttttcaaatccgccgagtaatgaagagctgaacagagcggcggacgaatggcaaaatcccccattgcttatttgtgagcctgactattattatgacacccgcgctttgggtgtttggagcctgaaagataaacggcgcccgctctcagctgtgcttgaagatcagctggacgaggctctcaagttttacatgaacgaagtcgaacagcggggctggtacggctattggcattacggtgatgtgatgcatacgtacgatgccgtccggcatgtatggcggtatgacctgggcggctatgcatggcaaaacacggaactcgtaccgaacctctggctttggcagtctttttttagatccgggagggaagacatcttcagaatggcagaagcgatgactcgtcacactagcgaaatcgactgctaccatttcggggattataaaggcctcggttcaaggcacaatgtcctccattggggctgcggctgcaaggaagcgagaatcagcatggccggcctccacaagccttattattttttgacggcggatgagagaacgggggaagtgttaaccgaggtgaaagatgccgatcgagcgcttgagatgcttgatccgatgagagcctattatccggaaaaagagttccctgcccacgcgagagttggccccgactgggcggcgttctgttccaattggctgacggaatgggagcggaccggtgatgaagcgtaccttgataaaatcaaccggggaatcggccggctcaaagcgctgcctcttcgtctgctgtccgggccgactttcggatacgatcctaaagcttcagatctgcttcatatgggtgacgggaatcatggcggctatcatatggtcatcgcctttggcgccccgcaaacatggatggagcttgcagaactgctggaggataacgaatggaaggagatgctcggcgaattcggcgaattttatttgctggctgatgaagaaaagcgcaagaggagcggcgggaagcttcacgatgatttatttcactggccgatgttctccgctgccatggccgcttatgctgcgaggcttcaccaagaccggaagcttgccgaaaaagcatggcggctgttgctggacgaaaaacaaagccatacaccgctgccgatcgctccaaaacaagtccatgcgtggaacacgatcacggaaatcccttgggtcacgacaaactgcgtctcacaatggtgcctcaacacaatagccgtgctggagctgctcaaggatatgccgcctgatcaggacatgcaagaaaagatcatcaaagcaatgaaagatcatcccgctcgcgtgtgagggcaaaaaatgaaggttgccggaaaaatgtaagttcgagtggaacaatgagacgatcaaaagggggaattgtaaaatggcaagactgaagctgaagggaaacaagtggctcgctgcacccgctgtctttttgctccttatcgggtgcagtgcaaatgagacgtcgaatcaagacgggaaaggaaaagagaaggatgctattcatattatggctccgctcctctcgccggaaagtccgggagaaaacagtccgtctttaaaagcgctcgaaaaatacacgaaaaaacaaattaaagtgacatgggttccgaactcttcctataatgataaattcaacatcgtcatggcctcgggggatttgccgcaagccattgtcgtcacggacaagtcgccgggttttatcaagtctgtcaaatcaggcgcgttctgggagctttcaccttatttaaaagactacccgaaccttggaaaggccgatgagaaagtgatgaagaacagttccattaacggcgagatttacggcatttacagggcgagggacctcatccgcgcttcgattatcatcagaacggactggctcgaaaatgtcggcctggagatgccgaaaacaatcgacgaattttacgacgtactgaaagcgtttaaagaaaaagaccccgacggaaacggaaaggacgatacgtacggcatggtagtcccgaaatggatggggctaggcaacgggagcccatgggatattatgcagacatggttcggtgctccaaaccgctacggagtagacgaaaaaggggaactcattccggacttcacaacagaagaatatatggaagcgctgcgttttttcaaaaagctgtatgatgaggggctgatcaataaagacttcgccgtaatggattcagcgaagtggaacgatccggtcgtcaaagggaaagctggtgtgatcgtcgataccggttcgcgggcatcgcagatacaaagcgcaatggaggaagcagatcccggaaacaaggatgtgatcgatgtcatcggaacggtcaaaggcccgaaaggaacgtatacattcccgacatcaggatacgccggaatgattgccatcccgaaagcgagcgtcaaaacggaaaaagaactaaaagaagtgctcggcttcttggacaaaatgaacgatgaagaggcacagatcattgccaataacggcgtaaaagggcgcaactataagcttgaaaacggtgcgtacacgtcccttgaaaaaaacaacaaaaaactgctttacgagcacgagggtcttgcgcagttcagcatgggcattccggaacaaagatactatgtggaaaagcaagaattaaagctgtttaaacaccgtgaacagattcgcaaagaaggggagaaaatcgccgtattcaacccggcagaatcgctcgtttcagatgtatacacccaaaaaggggcacagcttgacaacatcatcctcgatgccaaaacacagtttatcatcggcgacatcgatgaaaaaggctttcaagacgccgttgagctttggtataaaagcgggggcgaagatttgatgaaagaactgaacaaacgctacaaggagactaaatagctcaggtctttaaacagcacacgaaaggggggatgcggcacatggaaatcaccgcaaaaacagggaagcccgctgttaagacagaaaagaaaccgactgggctagaggccgtaaaacgggataaatggctttatcttctgcttgttcccggtgttttatattttctcatatttaaatattggccgatgtggggcgtattaatcgccttcaaggattattcgccttatctcggattttggcagagcgaatgggtcggattcgagtattttaaagatttctttatgaatcctgacttcttccgtctgctccgaaacacgcttatgctggccgctctcgatttgatctttgcatttccggccccgctcattgtcgctcttttactgaatgaactgcggcacgccatctataaacggtgcattcagacgtttatatatgttccgcatttcgtctcatggacgatcgtcgtcagcataacgtttgtctttttcacggttgatacgggcgtgatgaataaagtgctgcaaagcataacgggccgagagattgcgtttctctcagatcccgaatggttcaggccgatgattgtgctgcaaagcatatggaaggagacgggctggggaacgatcctgtttctggcggcgctcgcttcggttgaccaagagcagtatgaagcggcagtgatggacggtgcaggaaggttgaggagaatgtggcacattacccttccggccatcagaagcacgatcgtcgtgcttctcatcttaagaatcggcagctttttgaacatcggcttcgaacagatttttttaatgaccaattccttaaaccggagcgtagctgaaatcttcgacacatatgtctatgttgtcggaatcacgcagggcgcatacagctacagtacggcagtcggtcttttcaaatcggttgtcgggatcatcctgatattctgcgccaactatatcgcgaaaaagtttgaccaggacggtctgttttaatgaatggaggtgaaagggatgtccggtgcggaaacgatccataacacaaaagcgggccgggtgttcgattggtttaatgtgatctttctcggctgctgcggactgataaccgtcttgccttttctgtatattatcgcggggtcatttgcgacggaggccgagctggcggaaaggagcttctttatctttcccgagacgttctcgcttgacgcgtaccgctatattttttcaacgccgacatttatcaggagcatgggggtgtctgtgcttataacggtcgtgggaacgatcgtccagctcttttttacatttacgatggcctatcctcttgcaaaacggcacatcaagggaaggaatctgcttttgaatctcgtcatttttgcgatgcttttcagcggaggaatgattccgacgtatatcgtcgtcaaatcactgggactgctcgattcctattgggcgctgattttgccgatggcgatcaacccgttcaatctcattattattaaaaacttttttcagcagcttccgaaagagcttgaggagtcggccaagattgacggctgttcagaaatcggcgtgttcttaaggatcgcactgccgctgtctaagccgattattgcgacttttgcgctgttttatgcggtcggcatttggaacgactttttccatgctttgctgtacatcaatgacagtgcgaaatggccgctgcaaatggtgctgcgccaagtgacgattctttcggatctgacggggacgacgaatgatatgatggaaacggtgccgcctgaacaatcgatcaaactggccgtcatcgtcattgcgacgcttccgattttagccgtgtacccgtttttgcagaagcattttgccaaaggcattctgatcgggtctgtgaagggataaaaaaaaaccgccgggctcatgtgccggcggcttcggctcaggcagctgagccgtttttatttctttttttcatccaaaaataaaccgggagaccgacgagaccgatcaagatcgaccacaggcagctgtagaagtctgtgatgagcgtgctgacaaggacaaacaatgacccgagaatcgccgctacaggcaggtaaggatagagcggcacgctgtaagatcttccttggccgttcttccgtctccgcaaaataaataccgcgaaaaacgccatgacatagaagatgtaaatcataaaaatcgaaacctctgacagcttttcaggattgctgatgatcattaaaatgacagcgataatcatctggacgatgactgcgatccaaggcgtatggaatgccggatgaacatgcgagatccagcgggagaaaggcagctgttttttctcagccatcgcaaagatcacgcgcggaaaagacagaacctttccgtttaagcagccgaagatgctgacgataattccgatggatatcagcttgccgccgagcggcccgaacagcatggtcgcggctgtgcttgtcgcattttcgccgagcttgacaatctgatcggcaggaagaatgtgaagcagcgccaagttaatgaacagatagcaggcagtgacgatcagtatgccgcctgtcatcgctttcggaagcactttttccggattcttcatttctccgccgagtgctgcaagaaggatccagccgtcatacgcgaatagcgtcgccaataccgccgccccgaagttttggctggcgatgctctccgtgaccgaactgaaaatatattcatcgccctgccatagaccgaacacaatgatacatacaatgggaatcagctttccgatcgttgtgatcgtctgaaccgctccgccgtattttgttccgacgatgttgacgatgcataaaaaggcgacggtgatgatgccgatgagtgcagtccaggatttatcccaggaaaacaagttggccacaagcgagccgaaatataatccaagtgcgccgatgatggccggtccgtagatgatgatctgcacccagccgcataagaagccccagaactcgccgtaaatttcttcaagatatgtgtaaagaccgcctgttttcggaatctgtgcgcccagttcagcgatggtcagcccgccggcaagcgtcaagattccgccgagaagccaggcgaaaagagcgatttgtgcgtttccggaataggaaagcacgctgccgggcttcataaacacgccggaaccgatgatcgttccaatcacaagagatagcgcaaataacaagcctatctctttttttagtccgtttgcttctgcattcattgctatgcctcccattgatgtgatctctttcatagaaaactatttttatattgtaataccttttttaaaaaagaaaaattaaataaattttctgattttcgtatttcttgtatatgttaaacatttcaaggtcgtaaaccccgggataaccatcaataaccgaactttaatatatgatttttgatatattgttagtttttataggagagggagggaggcccgaccgggaagacggtttggttgacttttcaaatcaaatcgcctattttggagaaagaataaatctcgaattcgagatatttaattgggagatgatagaatgaacgtaaatggcattcaccacgtatctgctttaacagcaaacgcccagcataacctggatttctatgtcaaagggcttggcatgaaactgataaagaaatcggtcaatcaggacgatccgaccatgtaccacttgttttacggggatgaagtcgcgtctccgggttcggatttgacatttttcgagattccgatgcttgcccggagacgggaagggacgaactgtatttcggccgtatcacttcgggttcccggtgaacaagcactcgaattttgggagaagcggcttcatgagctcggcacagagatttgcggcatcgagacgcgtgcggggcggagcattctccgctttttagatcatgaaggacagaacatgatgtttgtagctgatgaaaagggaaaagaccatggagtgcctgtgaaaaacggcgtcattcctgaggatgctgcaatcagggggctcggcccggtcgaactgactgtcagggacgccggtccgacggcggcggtgctgaccgatattctcggctttcataaaatcggtgaggaacaggctgacgaatccggccaaacgcttcacatatttgaatcgggtgaaggaggagcaggcacggaggtgcatgtgaaacagtcagatgacggcagaagagagcgtcccggaagaggaagcgtccatcatgtcgctttccgcgtcaaagatgaagaagaacttaagcagtggcatgagataatcagtgagaacggcttttcgaattcagggattgtggaacgctattattttaaggcgctgtatttcagagaaccgaacggcatactttttgaactgtcgactgacggtcctggctttgccgttgatgaatcaattgatgagctcggccaaagccttgcccttccgccgtatctcgagcatcggcggaaagagattgaagcgcggctgaaaccgatccgataaaaaaacgaggtcccgaaaaggacctcgttttttatataggctctgttaaacgtaaatgttgatatttgataactttccataatattggtataatcagatgagaacaaacattcgatgagaggctatcaaggtgagcgaagcgtttgcaacttgttaaagtatatcggcaaattaccacgagctgaaaaagaacaagtgtaccaaatgggttaaacgctatgctgaaccttcttccattgttggtgtttgattataacagagacatatgacagtttgcgactcgcaaaaatgaatgtgcagtcctaattcaaccattcagtaggattgttagaaagcgctgaatagaaatttataaaatgttgggttattaaaaatgaaaagtgaggtttgtatatgaatactgtcagccaagaaatccaagatttgtccattaaatctttggaatcaacttttaataaactaacaaatgcttataaaagcacgacagaaaaaggttcaaacacaactcttgtcaaaaagagactaaacgcagtgaaaattggtttagaaagcctaaaaggtacttggtatggagaagatttcggctataacgaagaaatcatattgactactaaaaaagttttaaaaggtatcattccatctattgaaaaacaaatagcaaaagcaaaagaaggcagtcctcaaaaaacattaaatgagcgtcgcctgactgcactaaaactggcaatcgaatctttggagaaccgtcttatataagacggttcttaaattgtttcagaatcgtgtgagttacataacaagattgaaggaaaccgtttttactacggcttccctttatttttgcgtatttaacaacatccaaatctaacagagtctttatataaaaggcatccggcacagccggcggccccgtaaaggggggcatgctgttaagatgatgcggattctttctggtcaagggtgatttgttttgtcatggttttgccgtttcgaatgagggtaacctttaccgtatccccgatttttgcatcgttgtaaagaaggttgcgcagcgcgcttcctgtatcggtttcttttccgttaaagctgacgatgacatcgttctctttaaggcccgctttttcagctggggagcctgaagcgacctggcggatgtagacgcctttgtttaactggctgccgcttaatccgagcgtgcctgtttgatagttttccggcacctgctcaagatccatcattccgattccgatgaacgggcgctcaatttttcctttagacatcagctcttctgcaatcggtttgacatcattgcttggaatcgcaaatccgatgccttctactccgctttcactgattttcatgctgttgatgccgatcacttcaccctttgtattcaaaagggcgcctccgctgttgccggggttgatggccgcgtcggtttgaatgacgttcatctcggtttggcctgcggatgtatctacggaaacggtccgatcaacaccgctgatgatgccttgtgtcaccgtgcgggacagatctttgccgagcgggtttccaatagcgatcaccgattcgcctgctttcaagcttgacgaatcgccgaaagaggcgactttttccacgtgatcagcggaaatttcaacaacggcaaggtctgtcaacgaatcgctgcccagcaatttaccttccacttctttgccgttggacagggaaaccgtcagtttagacgcgccttcgacaacgtggttatttgtaataatatatgctttgccgtttgcttttttatagatgacacctgagcctgtgcctgtttcttgttcgcttgagctgctgctgttgctttcaaaaccgaacataccgctctctgtttgtttttgatagtttgaaataccgacgatggcgggagatacattttcaaccattgtagaaatgtcggacgaattggtgctggacaatttttcggtattcgctttagtggaagaagccgatgagttcgacgtctcgtttgtttgcgtctggacggatgtattggccgtttcgtctatgctatgctggtatgtcgtgacgccgagaacgaggcttcctccgatgatgccgctgagaatcggcgtcatccacgagagtctccgcttttgctgttctgctttttttatcgcctggtcgggcttttgatcggagacgatgagttcgttttttgtttcaagctgatcttctctattatattccatcattttcacgctcctattgttatcatatcctttgatgccttaatcataaacaaagactgtgggataaacatgaaaacattgtgggaaattgtcaaagaaaaaggatagaatatatagggtgctatttataatatgacatgtcagaggtgttctaaacgttgaacaagattggatttatcggatacggaagcatggcccggatgattgcggtgaaactgctagatcaggggaaaatcagggatgacatggtggtcgtcagctcaaggaatgacgggaaaacagaggagctgaaaaagctttatccgaatgtcgcctgtcaatcagctgatgagctcgccaaacagtgcggcctgatcttcatctgtgtaccgccgatggcggtaaaagaaacgcttgaaaaaatacagccgtttcttcaggaggatgtccacatcgtttcgattgccgcgggggtcgagcttgaccggcttcacgactggacaagcggacaggtgacgagatacattccgacactcacatctgaagccgggatcggcgtttcgcttgttgtccacggcgagcgggtcgctgaggcggacaaaagccggctggaagaatatctttccgccttcagcacagtcaaacagatcaatgagagagatattgacgctgcgagcaatttaacaagctcttcaccggggttcatcgcttcgatttttgaagaatttgctcaagccgccgtcagaaacagcagcctcacggaagaagaagcgtttcaatttctgattcattcattgctgggaacaggcaagctgttaatggaaaaagacatgacgtttgctcaaacgcttgatcgggtggcgacaaaaggcggcataaccgcagaaggtgcggaagtcattcaagatgccatgccggaagtctttgacgagctgtttgccagaacgatgaagaaatatgaagtcatcaaagacgctgtccgccggcagtgaaccgcggcatttatcgacatatccggacatcccaaagctgcctgcccaggcagcttttttatttgcattcgacaacattcatcaaaattccaattttatatcaaatttctaaaattaccaatggttattgcatttctattaaaattctaatataatttgttagaatattcccaaaataataaaaaatttgagacgtttttcataaggggtggttttttgtgaagctgtatatgtctgttgatatggaggggatttccgggcttccggatgatacgttcgtcgattcaagcaagccgaactatgagagaggccggaagatcatgacggacgaggccaatcatgtgattgacgaagcgttcaaaaatggatgcagagaggtgattgttaatgacagccactctaaaatgaacaacctgttaattgagaggctccatcctgaagcgcggcttatttcgggagatgtcaagccgttttcgatggttcaggggcttgatgatacatacgacggagccgtgttcgtcggctaccatgcgagagcgtcgatgagaggcgtgatgtcgcacagcatgattttcggcgtcagacatttttacatcaacgatcaggcggtcggcgagctggggttcaacgcctatgttgccggttattacggcgtcccggtcatcatggctgccggtgacagcgaggcggcagctgaggcggaggagctgattccgaacgtaacgacagcagccgtcaaagaaacggtctcccgttcggcggtcaaatgtctgacgccggagaaagcggggcggctattaagagaacggatggcatatgcgattcaaaaccgcggtcaagtcaagccgctcacacctccggacaggccggtgctgcggatagaatttgccaattacggccaagccgagtgggccagtctgatgccgggtgctgaaatcgaaccgcaaacgacgactgtccgctatcaagcgaaagacattcttgaagcctatcaagcgatgcttgtcatgaccgagcttgcgatgagaacgacattctcctaggaaggtgggatgaaaatggcgggttacatcatgaagcggctgctgtggatgctggcaaccattttggtgatcacgacattgacctttgtgatgatgaaagtgattccgggctctcccttcaatgaagaaagaaatacgaacgaagcggttcagcgcaaccttgaggcttactatcagctggatgagcctctctttgttcaatatttgtactatgtaaagtcgatcgttacctttgatttcgggccgtcgatcaagcagccttcgcaaagcgtgaacgacttgctgtcaagaggatttcccgtttcgtttgagctggggatgacggcgcttattgtggcggtcatttccggaatcgcactcggaatctttgctgcgctgcggcaaaacggcatcatcgactatatagcgatgaccattgccgtactcggcatttcggttcccaactttattatggcaaccttgctgatacagcaatttgccgttaattggaacatattccctccgtcgacatggacgagcccgcttcatatggtgcttccgactgcggctttggcgatggggccgctggcgattatcgcaaggctgacccgatccagcatgatcgaagtgctgacgcaggattatatccgaacagcccgggctaaagggctttccccttttaaaattgtcatgaagcacgccctgaaaaacgcccttatgcctgttgtaacgattctcgggacgcttaccgctgcgattttaacggggagcttcgtcatcgaaaaaatctttgcgattccgggcatgggaaaatattttgttgaaagcatcaactcccgcgattaccccgtgattatgggcaccaccgttttttacagcatcatcctcatcatcatgttgtttctcgttgacatggcctacggaatactggatccgcgtattaaactgcataagaaagggtgagcttatgagccttccagtccgcacagaaaaagaagcgtcttcaggcagtgatatccctgttgaatggtttgccccgctgaaacagaagcaggatgagcgtgaatccgtcgcaaggccgagtctgtcatattggcagaacgcctggcggattttaaggaaaaacaagctggcgatggcgggattgggcgtgttaatcttcctgttcttcatggctgctctcggaccggttctttctccgcacagcgtcacccagcagacgctatccgagcaaaacctgcctccgtcgacggagcattggttcggaactgatgagctcggacgcgatgtgtttacaagaacgtggtacggagcgaggatttctctgtttgtcggtgttatggcggctttgatcgattttgcaatcggcgtcatctacggcggcatcgccggctataaaggcggcaaaacagaccacgccatgatgcgggtcatcgaagtgctgcacggactgccttatttattggtcgtcattcttctcatggtcatgatggggcctggactcgggacgatcctcgtcgcgctgactgtcaccggctgggtcggcatggcgcggatcgtcagggggcaggttttgaaggtgaagcatgatgagcatgttctcgcatccaaaaccttcggagcgaaaacggtaaggatcatcaggcggaatctgcttcctaacatgatgggagcgatcatcgtccagatgaccttgacggtgccgtcggccatttttgccgaggcatttctcagtttcctcggtttgggcattcaagccccgtttgcgagctggggtgtcatggcgaacgacggccttccggtgatcttgtcgggacactggtggcggctgttttctcccgctttctttatttcattaactatgttcgcctttaatgttgttggagacggactgcaggatgcgttagatccgaagctgaggaggtaatgtatttttgcggaaaaaagtattggaagtcgagaatttgcatgtttcatttacgacatacggcggaacggtcaaagccgtccgcggcgtgagctttgagttatatgagggggagacgtttgcgattgtcggcgagtcgggatgcggaaaaagcgtgacatcgcaaagcatcatgcggcttttgccgaagtttcggcaacggtcacaggacggtgcgatccgctttaagggaaaagacttgcgccacctgtccgaaaaagagatgagaaagatcagaggggccgaaatctcaatgatcttccaggatccgatgacggccctgaatccgaccttgaccgtcggagaccagctggcagaagcgctgttggaacatcggcccgtgtctaaaacagacgctcgaaaagcagtcatttcgatgcttgagctcgtcgggatcccgaatccgaaagagcgtttgaggcagtatccgcaccaattcagcggagggatgaggcagcggatcgtaatcgccatggcgctcatctgcgaaccggagattttgattgcggatgaaccgacgaccgcgcttgatgtcaccattcaggcgcaaattcttgagctttttaaagacattcagcggaaaaccggggtatccatcattttaatcacccatgatttgggcgtagtcgcacagacggcagacagaatcgccgtgatgtacgcagggaaaatagctgaaacgggagcgaggagggatattttttaccgtccgcagcacccgtatacaaaaggcttgctgcactccgttccgaggcttgaccttgaagatgcagacctcgttccgattgacggaacaccgccggatttgttttctccgcctgaaggatgtccctttacggcgcgctgttcccgcgcaatggaagtgtgcggcaaaatccatcctgccgttacagaagtctcggcgggtcaccgagtgtgctgctggcttcaggatgaaagggcaaaaagggctctgctgacacataatcataaaatcgatttttcaaatggggggatttgatgaaaaggctgacgagcgtgttggcttccgcatttgcggtcatcctgctgttcggatgtacggcaaatgaacaggcggggcaggaaacgaagaagaaagcgaaagaaacggctggagaacaggttctgaggctgaacaacgaaaatgaaccgacatcttttgatccgccgatcggctttaataatgtctcatggcaggcgctgaacaatctgatggaaggtttgacaagacttggcgcagaccatgagcccgaagcggcgtccgccgaaaagtggaacatttccgacgacgggaagacatatacttttacaatccgtgatgatgccaaatggtcaaacggagaccctttaaccgccggggattttgaatatgcgtggaagcgtctgctcgatccgaaaacgggctcctctgccgcgtttttaggctactttatcgaaggcggtgaggcctttaacagcggaaaaggttcaaaagatgatgtcaaagtcaaagcggtggatgaaaagacgcttaaggtgacgcttgaaagtccgcagcagtcgtttttaagcattgtagccaatccggcctttttcccggttcctcagaaaatcgccgaagacaatccgaaatggcatgaagaagcagccacattcgtcggcaacggtccgtttaagctggcagaatggaagcacgatgaaagctttacgatggtaaagagcgatacgtattgggaccgggatactgtgaagcttgataaagtgacatgggcgatggtcgatgaccgaaataccgactaccaaatgttcgagtcgaatgaacttgatacggcttatgtcccggctgaaatgagcgagaagctgatgggctctgatgaggtgaaggtgtttgatcaggcgggtctttatttttacaggttcaatgtcaataaagagccgttccagaatgaaaaaatcagaaaagcgtttgcgatggccgtcgatcagcaggaaatcgtcgattacgtcacgaaaaacggtgaaaaaccggcacgcggatttgtgtctccgggaatcaaagggccgaacggcaaggattttcgcgaggaaggcggcgatttgctcaaatataacgccgatgaagcgaaacagctgctcgaaaaaggcatgaaggaggaaaactacgaaaagctgcccgccgttaccttgacatacagcacaaaaccggagcataaaaaaatggcggaagcggttcagcaaaaactgaaaagtacgctcggcgtcgatgtgaagctcgccaatatggaatggaacacattccttgaagaacagaaggcgctcaagttccagttttcccaaagctcttttctggctgattatgcggatcctatcaacttcctggaaagctttcaaacgggtaacgcaatgaacagaaccggctggggcaattcagagtatgacgagctgatcaaggcggcgaaaaatgaagctgatgaagaaaagcgcactgagctgctgcatcaggctgaagaactgctgtttgaagggatgccgatcataccgatccacttctataatcaagtccatttggaaaaggagaatgtgaaaggcatcgtccgtcatcctgtcggctacattgaactgaaatgggccgaaaaaacgtcatgaccaaaattgtccgtctgctattttctttgtgcatactgccgcacaggagcggacggacttttcataaagggggatgtctctgttgaatattgcgcctcaaagattaatgaagggagatacggttggtgtgattgcgccggccagtccgcccgttcctgaaaagcttgaccgggccgtccggtttttaaaagagcttggacttgaagtcaaagtgggacgctcagccgccgaaagacacggctatttggcggggagcgatgaagagcgtctgggggatctgcacgacatgtttgaagaccgttcggttaaggctgtcatctgtgcctgcggaggttacggaacggcacggattgccgggaaaattgactaccggctcatcaaaagccgcccgaaaattttttggggctattcagatatcacttttttacatacagcgatcaggcaaaataccggacttattacatttcacggaccgatgctcagttctgacatcggcaaagatgacgtgcatccgcttacccgccgctcctttcagcagctgtttcaaaaaatgacgctctcttatacagaggaactgtcgcctttggaaacgctcgtacacggcgcggcggaaggggagctcgtcggcggaaacctcgctcttctggtgacgacgctcggtacgccttatgaaattgatacgaaaggaaagcttttgtttatcgaggatgtcgatgaagagccttatcgaatcgaccggatgctgaatcaattaaaaatggccgggaaattatcggacgccgccggcatcctgctgtgcgattttcataactgcatcccgaaaaaacgcgataagtcgctcacattaaaagaggttttccaagattatatcgcctctgaaggaaaaccggcgctgtccggctttaaaatcggccattgttcaccgaatatcgccgtaccggtaggagtgaaagccgtccttgacgccggcaaaaaacggctcaccatcgaaccgggaatttcttaatgggaaaggaggccgccatgaagattgccgagattacgacaaaccgcatcgccgttccgctgaaaaaaccttttaaaacagcgcttcgaaccgtccgcaccgcagaagccgtcattgtcaaagtaacggctgaaaacgggatgacaggctggggagaagcgcctccgactgctgttattaccggtgagacgcttgacagtattgagggggcagtcaacacgattctcgcacccgccctcaccgggtgcaacttgcgaatggctgaggcgatatttcatgatatcgacaagctgattgttggaaatacaagcgcaaaggccgctgtagaaacagccgtctacgattgcttggcgcagctttgcggtcttcccctgtatcaattgctgggaggatacagacgggagatcgagacggattttaccgtcagcgtcaatgacccggaagaaatggggaaagacgcggcccgctatgtacaggaagggtttcgcacgctcaaaattaaggttggaaaaaacgacatggcaacagacctcgaacggatcagggaaatccgcaaacaagcgggtcccgctgtccgaatccgcgtggacgccaatcaaggctggacggcgaaacaggcggtcaaagccattcggaaaatggaggatgaggggctttcgatcgagcttgtcgaacagccggtccaccggctcgatctcgaaggcttgaaacaggtgacagatgccgtcgatacgccgattatggcggacgaaagcgtgtttaccccaagggatgcttttcacgtgctgaaaacgagaagcgccgatctcatcaatattaaactgatgaaggcaggcggcatccgccaggcgctgaaaatcaacgccatggcagaagcgtgcggagtggaatgcatggccggaagcatgatcgagacaaggctcggcatcacagcggccgtccacttcgcagcaagccagaaaaatgtgacaaaattcgattttgatgcgccgctcatgctgaaggaggatatcgttgaaggcggcatccgctatcatgcaggaacgatcacgataccggatgctcccggactcggaatcacgaaagtctgccatgaggggggagaggacaaatgagcctttatacgacagccgtctcagtcgccaatgtctggaccagtccggaagcgccgcgcacaattgaccggatgatgctgtcaaaccctgtacatgtgagaagctggcttgacgaattgtcctacgaggagcgccttgagctatgtacggcaaaccttgttcaaacgcaagtgcttttcggcgaagatgtccaacttataaaggagcggggagactgggcgttcgtcatcattccgggacagccgtctgcaaaagacaaacgcggctacccgggctggattccaaaggactgcctggtcgaaaaaagcccggcgaagtctgagacaagcgccgttattcaaaaaccgacggctttcttatatgatgacaagaaaacgaaagttattgagctgagctttctcaccaagctgcccgtcttgtcttccggcggcgtctggtttgaggtcgatacaccgcttggccgcaaatggctgaaaaaagaagatgcggatctcgaaacacctgtaaaaggcagcggagacgatatcgttcaaaccggtcaggcgtttttgaacctgccctatctttggggagggatgagcgggtttggctacgactgctcaggatttgtcttcaatatgctgaaggcgaacggccgctccgcgccgcgcgatgccggcgaccaggcgaaaggcggaaaagaggtatccttcagcagcccgaagcggggcgatttactgtttttcgcatatgaagaaggcagaggacgggttcaccacgtcggcatttactgcggaaacggagagatgcttcactctccaaaaacgggcaaatcgatcgaggtcatatctcttaaaggtacaatttatgaaaaagagctgtgtgccatcaggcgctatttttaaataaaacggggggattggcatgcaaaccggcgctttattgaaagtcagccgtctgaaaatgcactttgacgccggaaggggcaaaacggtcaaagcggtcgacggcatttcatttgatattaaagaaggagagacgttcgggctcgtcggagaatcgggctgcggcaagtcgacatccggaagagtgctgatgcgtctttatcagccgacagaaggcgaggttacatatcgggggaaaaacatccaccatttgagcgatgatgaatcattccagtacaaccgcaaaattcaaatgatttttcaagacccgtatgcttcattaaatccgaggttaaccgtcagggagattatgacagaacctatggaaatccacggcctctacggagggaaaaaggcgcgtcttgaaaaggcggacgagcttctggaagcagtcggtctgcacaaaagctttgccaatcgctatcctcatgaattcagcggcggacagaggcaaagaatcggcatcgccagagcgcttgcgcttgaacctgaattcatcgtcgccgatgagccgatatcggcacttgacgtctccgtgcaagcgcaggtcgtcaaccttttaaaaaagctgcaaaaggaaaaagggctcacgtttttatttatcgcccacgatctttccatggtgaagcacatcagcgaccggatcggcgtcatgtatctcgggcacatggtcgagatcaccgacagcggccggctttatcaagaacctctgcatccttacaccc

(The sequence listing continues in the following parts.)
